United States Patent Application Publication US 2021/0189491 A1 - sequence listing, part 4

SEQ ID NO: 3085 - DNA, 11113 bp, Homo sapiens
gcttaggctgggaggcacagcgcccgtgtgctggaggcgagttggctccgggtgggggaggctggggttccaaaccagggcaggggaatggtggccctgcgtggctcgtggacctctctcagggacccctctcagcaggggccggaaaagcaggcccacacccagtggtcattgcaggaacttcacttgagctggtctgcttgtgagcctgtggtttggagaggagaagacgcacttccccatgagaaaaaggtggtcatccccatgggctccacagatgaggacaccggccctcagctctgccccctctcagaagccttcctcacctgggggttctgggtgaagggagctccccgccagagactcatgtgggatcgtgtgtggaccgtagagccacagagcgtcatctgtaagccagtttagatccaggctttaacttcagtttcctgtgtgacctttgagaagccatccctccaagtgcttcctttgaagggtgagccctgggtgcctctctctgagggaggcccttgctccatctgggcttgactgtgccacgggggatcagaagcaacatacattctgtcagcagctgccggaaatgctggagcagcagtcctggaggcggggtgaagcagtccctggcttttggaggaggcgtgagaagaaattcatggggggctttaattcttttcagattcccaaccattttcttctagctgctactgcctgcatttgtgtaacttagtttgcaacacaggtgacaagctttctctcgttggatgctcattgcagcactgtggggcgatgcagccaggcaggtgctattgcctccatttcactgattgagagactgagactcagagcagctgggagctctcctgagataacacagctagttagaagtcaagccaggtccccagggtagagctttcagtagtgtgtgaggacagcataaaatgaagtctgtagactgtttttttctctgagaagttcaagtcttctgccttgctgcttcttccctccaagacaataagttggttcggtgccctctccggtgacaaacttaggaaacatctcttcagtatgaggtagcagcctcctttagctattgtcacagccaattcacagaggtctaaggcccccagcttaattgatggttaaggaccaattccaccctattcctccacctccatcaaaaaaagcaggcaaacaccacttcatgcctactagaatggctattaaaaacaaacaaacaaaaacagaaaataacaagtgttagttagaatgtagagaagatggagaccgcatgcattgctggtgggaatgtcaaatggtggaatcactgtggaaaacagtttggcagtttctcaaaaagttgcacacttaccatacgatcctgaaattccactcccaggtgtatagccaaaagaatggaaatcagggatttaagcagatttctatacactcacgttcatagcagtattagtcacaataaacgcaaagtagaaacaacccaagcatccataaaaagatgaatgaggcccggcgtggccgctcatgcctgtaatcccaagcacttcaggaggccgaggcgggcagatcacttgacaccaggagttcaagaccagcctggccaacatggtgaaaccccgtctctactaaaaatataaaaattagccgggcgtggcggtgcatgcctgtaattccagctactcaggaggctgaggcacgagaatcacttaagcccgggaggcggaggttgcagtgagctgagatcataccattgcactccagcctgggtgacagagggaaaatctgtctcaggaaaaaaaaaaaaaaaaaagaaaagaagagatgaatggataaacaaaatgtgagctatacacacagtggaataatattcagccataaaaataaatgaaattttgacatatgctacaacatggatggacctcacatacattgtgctaaatgagatatgccagatataaaaggagcaatattatatgattccacttccatgaggtacctatactgggtaaattcatagagacagaaaatggaatagagattactaagggattaatgaggggatggggaaggggagctactgtttaacgggtagggaatttatgctggggatgatgaaaaagtgttggaggtagacggtgggatgaggacacagcattgtgaacgtacttaatgccactgaagtgtatactcacaaatgattaaaatggtaaatggtacattatatatatatattaacacaattaaaacagactgttaaaagaaagcaaacaggccaggcgcagtgactcatgcctgtaatctcagcactttgggaggccaaggtcacttgaggacaggagttcaagaccagcctggccaacatggtgaaaccctatctctactgaaaataccaaaattaactgggacgtggcagcacatgcctgtaatcccagctacttgggaggctgaggcacgagaatcgcttgaacctgggaggcggaggttgcagtgagccgagattgcactactgcagtccagcctgggtgacaagagtgagactctgtctcaagaaaaaaaaaaaaaaaaaaaaaaggaagcaaacaaacccaaatagaaaacaacaaccgaacaaacaaaagcaaaaaaggaggcaaaggaagaagagagggcccaagggtaaaggacaggggctggtgtggaagacacaacagtacatcatgaaaaggaacaaggtgtctctgggagaggtccaggtggtgctctgcccaaggggtcgcataccttagtgctgggaagagaggcattctctggggcctgagactcctgcagggaaactgtcccagtatcagccagagaagagatggctttcttttactgcatggcagcagccctggagccccggggcaggatcatatccctagggtgggagaagtgcccatttccaatttatttatgtgttttatccccagagtgggataaatgactatgaaactgacctaatatttatgtctattttaaggccgggggttgatatgagtgctttcttgatgaactgcgcccttagagctatttactttagtggaaggtttcttttgaggaggagattgggaaaagtcatcaaattccgtggttgctgcttcctctaattatattctcacttttgaataatttttaagcctttcggaagtagaagaaataggggcttttaaaatgatgggagcattcccaacaaaggtaaaatgctccctaccttggggcccagctctttactgtgagtttgtgacatctacttttatcattctaaaagtttcatgttgtccatactgcctgttaggaaacatggaaaagctggctttcaaacttggacttggagccaggcatggtagcatgtgattgtaatcttagctacttgcttgagctgaagactttgaggctgcagtgagctatgattgattgtgccactatgctccagcttggatgacagagcgagacctcagtctcaaaaaaaaaaaaaaaaaaaaaaagggactaaggctggcagagacaagaagactaaactttgtattaatttgttgtatggtcattccttgttttttcagaatggactcctctcttttttccctttaagcaacaagatagtggagttacaacccagcccctgccggtagatttctctgttcggtcccgaaggttaaagtccttagatgaaaaaggctggaatgcaaggtattgctattgccctaatttctcagagaagtaaactgaggctgagagcagtccgggggtttgttggaggccacagaaccggttagaagaggcgtggattaggatgcaggtattgtgactcattctgcagacttcccttggggttttcaatcttgtcctttctggtcatgcccatgcctgggtttagacacatgctgagggctaggcaggagtgtgttggatgttgtggggtgagtgtgggaatggagggtagctcttgcagtgctcaggctagagctggtcctaacccttccatggaggggggaggggtgatagcaattcaggccagaccgtttcttggaagggcagggtgtgagtgctgggtcaggctagtgaggcatagttctacatgattgcattcagcttgcaatagctgatggcactgatgaatggagtctctgggccactcctgaggctggccagctcccctgccttcccctccgaattcagatgccctcttttgaggttgctgttctggtcaggatagctaagctctttccttcagtaggccgttgttttattattctcagattatctgggaggggtctttagtctcctctcctcagatagatttagcacatctcaccttgatggttcctgaagaaaggactctgactttgagaggatggaaggtcggggagtgagctgagatgagacgagctggcaggagcgctggcagcgaggaaggcagctgcagggaccctatccaggtgctgtgttgggtccaggccttgaaggcaaactcctcctactccccatgtgagctgacaggagtgtctcagggagggggctgctgaggttgtcttcgggccacatggctgctgggcatggcactggattcaggaccaagactcccgggctctaatccttgctccttcagttcacgttcttctcttctctgggtcttagttttctcatctgtagcaggagccaaccaattctaaggtcactcttagattctacaggactctcactggaagagaacccaggaggggcgtctgggaggcggctgctcagggtggccaggtacgaagccaccaggcagaggcacaggaggcatccctgaatcaccgaggagtcacctgccatgagcaatctgtggtgagagagaaggaggtgcaggccagtcaggggaaggaggtgacttccaaaacgccagggaagtttacaagcaggttttgtctaagtgattggccagtaggcgctagtagcaaacaaaccagcgcagggtcccaacttggtcaggagtggaatgcttttttttttttttcttaaagataataaatccaatcaggtcttttatcttgtttagaaatcataaatttaacatgtattggggttagcagaccagttcaggggctgtttgggggcattgagtcattaggctgggagtatttacgaggcagagtttaaaggacaccatttaacaattcttggcctggggctgtcttggttgcagctttgggcatcttttgggattctgtttggaagttttgcttgttgaaatatagcttagaatgcagagaattaagtgccttttgaaaacattttcatcccatcctaggcagttaaattcccaatactttggaatcatggctataattcagtttacaaacacaaatggagtacccactatgtctttttattttagtttattttatttttgagacagagtcttactctgttgcctaaattggagtgcagtggtgtgatctcggctcactgcaacctctgcctcccaggttcaagcgattctcctgtctcagcctcccgagtagctatgatttttggtgtgcgccaccacgcccagctaatttttgtattttttagtagagacaggatttcgacacgttggccaggctggtcttgaacacctgacctcagatgatccgcccgcctctgcctcccaaagtgctgggattacagctgtgagccaccgtgcctggcccccactatgtcttactacctgcaagacacagtaccaagtgtttcaaggaaaatgacaattgaacaatactaggtccacagcaggtgactcaacatttcccaaattgtattaagtttggggaatttttattttcagataagaaggcacatcaacacacatctacatgctgacctacctgtgtctttttgttgtgggacttgggtcttggttcctgaaaactttttcataattgataggtgaaaataacaaaaatgtggtagacatgtcttggaatgaacactattaaaaagaaaaataggactctggaatacaaactggtttagacagtcaataaatgaatgtctactcagtgggcacttggcaggggtaaagaacatgctctccacttgagcaactgtgaggtgtatttcagttattcctccaagccatgtagcattattgccattttccagataaagacattggagcttaaactagttaagtggctcgataaaggtcatctagctagtacatggtaaagtcaagtctttctgactcaaaaatccatgctcttattaattaattaatttaagaaatattaattgagcctttctcatcaaacatgctgcctccacatggggcactctgtgtgctctaaggggaagaatcagacaatcaccaaacacagcacaatataacacattttgtaattaagtgctaatttaagagctatatgaattcagggaagggagaatatgtcagctggagaggcttggcaccatgtcttgagaggatctcaagctgggtctcagagcacagaaaagatttgcaggaaccatgaatagagaagagcggcagaacttgtgtctgggggcagtgagatgcagaggtaaattggagcagatgctttaactttgcaaggtcacctgctttgaggttcaattataactacctggagtggcctttcaaccctcaaatagtgaagagggtggtttcattgtctaactcccacgttcatctgccttaatagtgactagctctaagtccagaaggagaactgggaggggtgagaatatgaaatattactcattgacagcaatttccacatgcttcctaaaacaataaccaacccaaattacctacatctacacagatgacacaggtgatacaataatgaaataattgatgaaataataatgagaggagtcctaaaagtagagattttaaaagccctgtgttcccaagagccatatgctactagctgaaaagcgctcctttctgtgcgtgatcaaaaccttttctgttcccttaaaaaataatacattggtaagcaggtgtttcattggttgaagaggtcattgctcggtgtcaggttggttttcagagaacagaaatgacagttctatgaaatcaacttgaacaaggtatttaactcagcttctcagaagttgccaataaactttatttaaagagattctcagaggaggctgttgtggtgcctctaactgactgcatcctatgcccactcttccctctcttttggccttctttttcagacttgtgtaaacccaagaaggtgggatagggaaagagattacaggatggtttagtgctctgcagttggacaggagaggttggaagttgtggggtggagtcccagaagaacctggtggctccaagtggtattgtgtggcttcttagccatcacatttaatctccccgggggtggctgttgttgcgatcctctgctttgccactggtggtgactagtgggaacgtttctcatagggttttggatggatgtccatgtttatctcttgaggcccattaatttggttgcttgggcactgcagtgatgggtctatgccgtgtgttggaaagagcactagattataaaagaagacttggtcctggacagttctgctgcatggctttaggtgagttccttaaggtttctccatctcaatttccttatttgccatctggatagttactctagataatctccaagctcccttccaagtctgtgatgagaggccaaagatgtaaattcagtctcctcatggagtagacagtgctgcgttgtgccagaatcacagacagcagccctgtcctatcctcaccgtgactcctctaggtgagacggtcagtggttcagaccaaatcctttgtcttttttttttttttttttttttgacagagtttcactcttgttgcccaagctggagtacaatggtacgatctcggctcactgcaacctctgcctcccgggttcaagcgattctcctgcctcagcctcctgagtagctgggattacaggcgcccaccaccatgcccaactaattttttgtatttttagtcgagatggggtttcaccatgttggccaggctggtctcgaactcctgacctcaggtgatccacccacctcggcttcccaaagtgctgggattacaggtgtgagtcactgcgccaggccgagtctttttgattaaaatagctcccagttgatgctgtcagcaaaattatgtagacaatctagggcggcagccatgctggtatgcctgagaacaggtggcttctgtcagttttaaaaccagcaaagcactgggcaaaccagccaggcggccaccccaagaaggacagttcctaccaatttagtgttaaggtggtgccagggcaagtgacagcatcactaagaaatataaaaagattctagaaaaccctgattttccttggccattacttgacttcccttaaagtctcttcgggtccctattaagtaaatactgaaatttaaatgatgaaatgctttctcccccagcccctatgcctgtgtaactaagtcacttcctatcccagaagctagtttggacctggtctagctggtcttgcaccagatgtccctgaagtcaccttctcatcccaggcttctccttctgccttcacctgtcctagggtgggagctgaaggttcagaggagtcaggtgggaccgtggctgggcctctgccttggttctcacacggtctcccaagcccttacctcatgcctgtgaaggagcaacttttcttccgaaaagatcttttccttccaaaatggatgctctgactgggctgctaagaaatgtgtgaccacaagaaaacaagagctttaagagatgagcatggatattccatgcctgggattcttagatatcctgatttaagtgagttattcttgaagggagggatctgagagtggtcgtagagtctaaaagagcctattttataaagcacagcctataacggcttagacccatttttccttttcttctaaacctgttttgagttggggagcaaagcaagtggttccctcaagtgtcttcccttttacctcattctccttctacccctagctttgcttatgaggtgtttcctatattctctgagggcacaaaacacttagaagccgtattataattcctaaaatctatttgaatcacacaattgatataaacatgtatttttgttgtaaaatttaaaattttgtccatctgatggatgagaatgacctggtcttggtttaatacccatttccctgagtccctgaatgaccgtgtggagcaggtcctcctttactcctggccccctggctaacctgtatctaactgatataaactagaaataaagtttattgtgttaggcctttgagattggggttgttacagcagttagcctctctgactgatgcagggcatttcaaataatggcagaatacagaaatctttttgacctctaaaaaccataccacgcaggcccagccctacctgaactgtaagggaagtggactttgatttcttaatatctagcctatggtgtgaaaatccaagtaactacagagaattaaaatagccttttctccctcttctgtttctgtctccctcccattgccatctttacccattgtctttttcaacattcttttcctctctccctcttccaattcacaaaggaaaatagaaatgttcaaaggttaaaataggccaatagttctttggctatgtcaatgcataacaaattggggtagagaattttaacaattaaaaaaaatttgttctgaatcttcctttggccttaggtaccatctagaggattacagttgtagtggtgtcttttctcctctttctgggtggctaaatatttgcacctcagctccctccttctctttgtgtatgtgtatagaaataatttcaatgccctagcttaagatctggcagtgaaaaatatccttatccacttggagaaggtcatccaattctggaaaagctgtctcaagaaaggaccatacacgttttataaaagcatgattattaagtttcaggttgattatcatgcaaatgcttccatttccccccttaccccactgaatctcctcctacaaccatgagtaaaatgacatctgggatgttgggaatttaaccagccagtcaggaaggccgaacaatgtttcctcagcccatggttcacaggggttctgagggcctttgtgcggaactcaaggagttgttcctttaaacaaggtgccggcttatctcacactttaaaacaccctttcctttcaaagttaagtgtttatctccttgggaatatgaattggtacaacctttcgggaaagcaatttggcaactggcatcgggagacttaaaggcgttttctaacttgacctggcagtccctcctctagtgctctagcctaagaaaataattggagatgcgatcacagatgcatgtacaaggatgcttatcacagcataatttatgacagtaaatcacctggaaacagcttaaaggctggaaaaataagggaagggcaaatccactcaacaatggaatattatgcagcctttaaaaatagtgttttcaaaaaaagtttaatgacatggaaaaatattcatgttaatgtgttaagtgggataaaaagcatacaaaaccaataaattctaactttattgaaaatagtttgtttaggcacacagccctagaagataagaaataagcaaatacaagagagaggagttttgttctaacctcagctctgacatgtgctaactgcctaccattgactaagtggtttaaactctctggatttttttccccagggttgtggtgaggatctgaaagaatatttgcaaagttcctggcacaaagaagttgctcaaaaattggtagtagttgttattatgattcttatccctattatactggtaggagtttgtcagtgacaaaagctgggtaagaatagttttggggggcagccttcctttacccttgtaacccaaaaagtatctgagacaggtctcaattaatttagaaagtttatttttttattttttttattatactttaagttttagggttcatgtgcacaatgtg

SEQ ID NO: 3086 - DNA, 8390 bp, Homo sapiens
agggaccctgggctaaggaagcacaagctggagacaccaaaatggtcttcgcaactcgcctctatattttctgccctgctcctaagccagcctgttggccgactggcccttctccacagatgtcatcttgagcctcttacagagtttcagcactgacattaatgacaagatggatcacctacaggacaaccttggatcctcaaccagcctgattaagcattgacactgcatttgtcaccaccagctctgatggtttggacatgtagaaatgtattgcaggagaatatgcaaacagctgctgtaaggtgagctgatcgggacaactgccagcaggcagaagggaaggcataattaatgggcacccttcagcagagctcagagcagaccaaacgccaatgcagaaggctcaagaaagaggcaaacagactagccactgctccaggatgactgtggctctttatgagtgaagagaaagggtggagactgaagacagaactggggacagtgacaggcttggggaagaacagctgattcagcagtcccaagcatctgaacacaaggtggacattctccagggtgacatcgcaaaatacatgggtgaagacaacctagtggccgtgacttggagcacccttcctcacaatgaaggcattctgggccagcctgaaaaacagcatggaaataaatcacctaagtacaagggactggcttaaaaatggtctaatgaaatgtcaaaagagttctcctgtggagcttcggagaagtttccttaccctttaaaaaaagaaaagaagaaaaggaaaaggtgatgatgatgacacacagaaggcatacacatttccatttctccctttggaaactttcatgtctgggttgagaagttaacagaaaggcaaacagcctgaggtcaaagatgacacactgaggataacaaaatggaaagacaatctgagctcttgatgatgtgtgactgaatgagccaaattaaacaactatagagctgttctacttccaatctaattatgtgagggataaatgttaatgcgctttttctttaggttttcatttagattttgtagtttctacggtacaaatcttatattcttttattgaatttcttaaacaaaatgttcttttcagactatataagtggaattgttttcttaatttcattttcagattgtttgtttccagtgtacagaaattccactggctttgtatagtgatgttttctacaacagtaatgaactcattaagtaactctaatagcatttttgaggactccttaagacttttcacacacaagatcatgtcatctgaaaatacaaatagttcttctttactccaagtaaaaagacatttttaatttctttttctagcctaattgttctggctaaaaattctagtacaatcttgaaagaagtggcaggagcaggcatcctagtcttgttcctgttattagggagaaaacttttaatctttcaccacgatgtattagtgaactgtgtgggcttttcacagatgccctttatcaggttaagaaaattatcttttcttccacgttttttgagtgtttttatcaagaaagtgtgtcagattctgtcaaatgctgtgctacatcttgaacctggaaagagaaggttgcagtgagccgacattgaaccactgcactctagcctgggtgacggagactccgtctcaaagaaaaaaaaacaaaaaaaaacagactaaggaactcaatggtaattaggtacttatgacctaattactcaggtaattatgacaacattttcgtgcctatgaattataatatcaatgtctcttctgtttctctcaaggaaaaattttaggccactaataattctaacttagagatattagcaacaacttggttcctcatgattataacttaagtcctcagtaaaagaatagtctcaaataactgaatacctacatgaaaaacctctctgctaactacacagcccacctccattaaatctacagactaaaattaccctatttgtgcatatatctcctaacaacactttgcctcccaacttgactgtgtgaccaatacacaaaaatatacatgctatttcaactgggaggaatgttgtggaaatgaaagcttttagaattaaaaaacaaaaacaatcctctctttaaaagaccaatacaccagaaataccaatgtttaatttggcacctcagttgtagacaacagccccttttctaactttatgttgcttctcagcattctgtgctttttcccctatactccataacctctgctggaagtataaaaaattccaggattccgtattactgtaggttcagctccttagagctcagtcccagtcattcactggcccatccaggaaactacttcctctcatttccaaggcttcctttaaatattccccaagtttgccttatctaaaacctggctttcttctgtcttcagggagcttacaatccagtatgggaatcatcgggaaaagtaacaaatgatgttccttggatttgtttttgtaattgcatgcactcgctatggaaagctaagaagggcatcaaactccaactgggggtaaagactcaaaaaaagatatctatagtaggtttatatgcaagtatgacaaacatgtttgaaaagaatgaaggttaagacagacacactagttgataggctaggcctgaaataataatgaactgaactaagaaaaaagggagattgacttcagataccctttaagctatgtcaaaagttttttgttttttttttttaattgaaattctaatacttacataggaataggaacttgacatggaggacacggtaatgcagtctgaataaatgctggctcagaaggctgttcccaagggcctgtaggctggtgctacaaataaaatacataagaattttaagtcagagggattaaatcatatggccattttaagaatctaagaaaatagttccatgtatcctctgctcaagcaggttgaaattttttcaaataatcaataaattgtgcttactgaaatatttcattttatctgtattaaatgaaattgttcctctccacagacatttgatattaataactgagacagaatccagtttataaatggtagaacaaaggcagtgtagcctcctttacttccaataaggaaatgagaaaaacaattggaaactccaacatctagcaattgaatataatctccatcattttactcactgttgttcctcagcacctaaaaaaaagcttgatatttagtaagggctcaataaatgttcatgaggctgggctggacgtggtgcctcacacctgtaatcccagcactttgggaggcggaggcgggcagatcacttgaggtcaggagttcgagaccagcctgatcaacaagctgaaaccccatctctactaaaactacaaaaattagctgggcatggtagcaggcacctataatcccagctactcaggaggctaaggcacgagagtcactgaacccgggaggtggaggttgcagtgacccagatcacaccactgcactccagcctgggcaacagagtgagactccgtctcaaaaaaaaaaaaaattaaataactaaaaataaataaatattaaataaaatattaaaaagtgaataaatctttaaaataagattataggagatatctataaccctaaaccacaatatatgaaggaggactgccaaattcacctgtatcatgatcataatgtaactatcacactgtatttgcaaacaatggtttcactcctttcctacactgtgagttgcttaaaacaaaatcaagtcttgattaccttgtaccctgctccaagcacagtgcttcccaataagtgcttaatcattgctcattgaaaaactaagtaaaagcaagaaagtacaacccacagcaatgcactatttctctaatagtattattcccttaccctgccagtctgctttattaatgcttgatcatgacacggagcaggacacaagtgaccacatttctccaaaactttttggcaaggttgatgacatggtggacaagaaccaaagtgacagcgatgtttttcttgacttgtatgatgacaagttggtggtcgactaaatcataaagtacaattttcaaaaattacttttagtcattgaataattacatctaaaggacaattatctatttacatatcttctgattccatatagaatgagtatactgtgaatattaatattttaaaacactaaagcaaaattaaattattaaaagccaatatgaatttaaatttgtacaacatcagatggaagcttgtgcaaagcttcaaactcacctgcattgctccttgcacttgggtggtcttgtggtacgttctcggccacagggcactgtcacctttgtattgccacaattacacttcacatctacggtttctgggcagggatagcaactgcctgaaaaaaaagtctgacaattaaaaagtttccttaactacccaaatgcctattaatggtaaaatacataaatttagtatattcacacaatgggatactctacaacaagaatgaagaaactacaacaacatgaatgaatcttaccacaaaacattgagccagacacaaggagtacatagtgcatgattccatttatataaagtaaacaagaaaaaatgtactgttcaaaatcagagtgatagctatgaaggatgcaaggaaggtgttgaaaattttggtcatgttctgtttaatgatgtaagttttggttacctggctatgttcagtttgtaaaaattcaacaagctgtatactttttatttgtaatacttttctctttttttttttgtaacagggtctcaacctgttgctcaagctgagtgctgttgcatgatcacagctcagtgcagcctcaactttctgggctcaagcaatcctcccacgtcagccttccaagtagctgggactacagacacacaccaccatgcccagctaatttttgattatttatagagatggaggggtctcactatgtcatccaggctggtctcaaactcctggactcaagcaatcttcccacctcagcttcccaaatgctgggtgtacaggcgtgagccactgcacccagcctctgatttataacacttttttctctgtacactggtacctcataaagttttagacatttctctaaaatgtgctaaaacttctgttctaaataacaaatttaacacattactcattcaaaactaaaacaagcaaaaatggatttaagtctttggaaaatttaacattaacaataatatcgttggcctactttcatacatctatccaagtacacaatttttagatgaattcccaataacttctttctcatgacctgatattggttagtagcaagcacagtcaattttccattaattgtgctttgtgaaagactaagtactaagccaccattttaggatataatcccaaatatttctcttctaaacataaaaaaaaatgttattttggtttcagctttttacgctcttttgttatgggttggcaaaaatataaaaaaacaaaatcaaagaaatctttaaagcaggctataaagttcgctccaagaggttctgtcatcatcttaagggctttcttccactctagttttcccagtaaggaactctatcagaaatgaaataataaaggaagaagagttttcaatgaagaaatgaatatcttaaagagactgttgcctaggtgtcaggaccaagcaaaacatggaccgggagttaacctgataaaaaaaagattaaagatggacaatatcctggcttaagtgcctctagaagttcaaaatagttccctaaaacaaacacaaattaagaattataattcaaataatgaacacagaaaaagagaagattagaggtaaaacatcgtagggtcaaacataacatttattatacaaaacaccaaatgtgttttgacacatatattcttgatgttaatgcaagtcaagttatcctaacccacatatcaagttttatttttattttacctaaagaatgactacaagttgtatttttaaagttgatagtgatatttaagtcggttctcattcggcatattatatctgtttctatacttaacaatgacaatttttcattcatcttcagcagaggaacctttttgttatcaaacgtaacctttttgttattctaaacaacagtatcacatttaaattacatcttgaaaataagggacaatttctctaaacagtctccctactgaccaacagaatttattataattaaaagagcttccataatactttcaaaatgaagaaatagcatagggagactataactatactgaccaataccagttaatagccaaaataggcatgattcgggtagttctaaaactataaacacagatgatcctgaatttaaaaaaaaaaactataaatcggctgggcgctgtggctcatgcctgtaatcccagcactttgggaggccgaagcaggcagatcacgaggtcaggagatcgagaccatcctagccaacatggtgaaaccccggctctactaaaaatacaaaaattagctggacatggtggcatatgcctgtgatgccagctgctcgggaggctgaggcaggagaatcacctgaaatggggagtcagaggttgcagtgagccgggattgcgccactgcactccagcctggtgacagagagagactccgtctcaaagaacaaaacaaaactataaatcaaattttcacatacccacaacacaaacatgcagttagtatattccccctataaattactgtataattctgattatgaaggattctagaatgatggaaaaatggtatgaaattatgattccacattcttttataactgtagatgaaacaaatattgacagttgcacaacagcatcttccacatactttacatcaaggaaaattttgttgtgactaataagcttttctaaggattaatagaaatctataaaaacaaaacaaacaaaaaaacaccactctaccaaaaaatatcaaaacctgaatctgatcaaacctctagatccaattaacaggttatcaaaaatatagaggacagaggaacatgttaaataataccacagagatgcaatctgcaaaactcagactctgagaaactaaataaagcaacctagtttcttcaacaaataagtcataaggggaaaaaaggagatagaggatggaaattataaattaaaagactttagagacaaaaccaattacaacatgtcaattttattaggtttttgagtctataaactgatgtaaaaaatgaagttacttatgagacaacaagaaatttgaaaaccagatgtttgctgatatgaagaaatatgttaactacatttaggttaagaatccatcttttagagacaaatactgaaatatttatgggctttgcttcacaaaaatatgagacagggaaatgcttccaacacttctccagtaagtatgatatttgctctaaactttttgcagatactctttatcaggttaaggatatgtctatttccaattaaatttttatcttatatagatgttagacatttatcaagatgatctcattcctcctttggtcttttaatgtggtaaattacataatattagatttactactgttaaaccagttatatcacagagatgtagtttgcaaaaatctgcaaaaactcaatgggtcagtgatgtaatgactataaaagaaaataaaatctttctagtgttggtgagagcatacctgaaaaactatttctaaacttcactgacaaatcaaagaacacctacaggaaatgtctacagggtaaatagaatctgacacttttcctaatggggaaggaatgtagtataatggaaataacataaacactgggttcacatcctgactctgcgactagttctattaaccttgggccaatagtctcccggcctgttccacatatccctatatgctgcaggatttctgaaaggatagggagatcaactgagaaacagttcagtagtttgttctaggtattaaactactaaatggcagagtctaggcttaaatccaggatttcttactctaagtccacgatctttccaatactgtataccatatctcagtagattccatttcatatcaacataatccaaatgagtgaagttaactcagtttttaatgtctagtaataacttataacataattctcaaagtatagtccaggaaccctagtggttcttgagaccctttcaggaggtctgcaaggtctcacatgcatagttttccagaagctagtgaaaagtgatgtccatagcagactgaatacagaagcatatatgtgaatccggctattttctgttaag

SEQ ID NO: 3087 - DNA, 444 bp, Homo sapiens
tgggaagtcaaagttcagctcaaagagattctgattaattctgggtttccagaagattgtttggtgacacaagtgtttactaacactggaccagataataatttggatgttgttatctctcttcctggcctttggtgtgtaccccaatgtatgctatcataaggaaaagacaaagattctcaccactgaagggtgtaatgcacttatccacaaatcatctgttaattgtccttttagtagccaagacatgaagtacccatctcccttctttgcatttggtgaaaagattcgaactcgagccatctctgctaaaggcatgactttagtcaccccactgcagttgcttctctttgcctccaagaaagtccaatctgatgggcagattgtgcttgcagatgactggattaaactgcaaatatctcatgaagctgctgcctgcatcac

SEQ ID NO: 3088 - DNA, 23509 bp, Homo sapiens
tctgaaacagggatgtgtcctacaatcaccatcagccaggaagtggtcaggatgcagtggttataactggattattttccctggcctggctgaccatctgcaaccccctggtgtttcaatgtacaaactattttaggaccatctgcgtactggctgttgcctgaaaatcttgtgttgatgtggatttgtaagactgggaaagcaccagcattcaaaacttgaagaaaggtgttagcagtttggcagacaatcctacagaaaactctttattcttgggggagaaaaagttgcctcccatcaacttcaatggttcacaggatgatgacgtgtggggaaacacaaacctcgacaacattgagtccaaatgtgtttcggaagactcagaatgaagaagaagatgccaaggaaaaccttaaccaatttattttcctttttaatgagtgatatgtgatttttcaaaagcctaaatacatctaaaagagctatatcagttaagtataagataaaaattctaaaccatagaaagcactgttactgcttaattgacagcaatttttctttctttgcaatgtataaaataatgggtgctttttatgttcactgaaattcatattgttgtctccttttacagctgggaaagcggaaatctggagaactaaaatatcttgctgaagatcacaatgcagtaaagcatagggcaagtttccaactcgaacatcaccccagaacacttccttttaaacataaattatgttgctaacttttttattgttacttagcaggcagatttcaaactgatacaaatgttgaaaatgatacaaaatgttttcccaccttaaaggcattctgaaacctagcacataacatctgtcactgaagtccatagtttccaatgccatgattggataaagaccctattgagactcatgtgtttgtctctcactgcttaaaacactcatgtgttttaagcaacatgacaagcacaaaagagaacaagtactgctcctgctctccaggaagttaccataaaataaaggggataaggtgccttccaaagaaaaaacaaatactaggagaggtcagaggagaagagagattattccagaaggagagactgaggcagatttcaggagggaagaatataagagtcccaaaagaagaaacaggaacccaggttagagagcaatgggcaaggggtaggaggtgagactaaactcacaaggaagttgcttcaaaacaatagtgccccaaatgccaagctgatgggttggacccatttaggaaaaacccacaaagtccacaggagagcagactgcacttccatgagcttcaagctgtaaacagtaacctcaaataaaacttttcccggatcggtaatttccatcctgaacaatggccaagtcaaggaagctgaggatcgagccccctaccgcatgccacaaagaacctcaagggaccccatgctctggggagctcgcaggaggaccagcacagaggtgtgactgcgttggggcagggtggccacatgtacaatgttgtaccttccaatgttcctccttaggctgtgcttatgaagtcccaacatgtcttctgggctgtgttttcaaccaagagagttaataaaaagtgggatgggcaccaactatgcctccagagacatcaggcagaatatgccacagcgtgccatgtcctcctgcaaacagtcagaaagaaaagatctctaaaagcagattggaagagactatatatacagagcgagtgccggtacagaagttttgctgcaaatacaccctctaatcccttgcaacccactgcaagctcgagagaccagtgcccttggtaaaacataggagagatcattaattaaagcctaggccctttctttgatcctgagggataaggcttgggaaaatgcacagtgataaaagtgaacattttaaaagagcagagtgagtgtgaattcccaaagagaccattcatatcaagacccaagccatgagaaaatgctacaatgcccttgatcaatactttataggcattttgacctcagatctaatcccatgaggcttagaccaagaccttgcttgatgcagacctctctgactgctgaaattggtcaggagctcagtgatgaaaatttggaaagtcaatgctgatacctgaagaaagtcccatcagagatctgtgacctgaatcttcataactttcacaggccctttctaaatgccaaggaggatgtgtgtggagaagaatatgccacctatggcatcccaatatgcctgtgcccgcctgctcttcaacaagggaatgaaacctgggtattctcataggttttttaaagcacttgtccacatattttattccgcaaataacacaatttaaaattcagctagaatttgccattttctgtcagggttgtgcatttcttccagtcaccatgacttcctgagatagccaaaacacaaaatttaaattgtgtttaaattaaataaacacaatttatgctgaagctgactttacccactctgttccaacattacttatcctcagcatctctgaattcaaatatcagccaggtgtggtggctcatacctgtaagcccagcactttggcaagccaagatgggaaggttgcttgaggagttggagaccagcctgggcaacatagcaagacccccatctctacaaaaaaattaaaaaattagccaggcatggtggtatgcacctttagtcctagctacttgggaggctgaggtgagaagatcacttgagcccaggagcttgaggtggcagtgagtcatgatcataccactgcactgtagcctgagcaacagagcaagaccccatcccttaaaaaaaatacctgccctctgtacttcatagcacctggggcattttgaacagttcttccttcacctgaggtcattatttgagaatccaattttagagactacaatgctctcattacttggattgtatcatttaatcttcccaacaatccaggaaggggagtctcttaatgattgtccttgatttccagttaaaaaatctagacccagaggtaaccttgtgaaggtcacagagtttcagagttctaagatcccatgcgagattgctgaacttgaacttgtttcttctgatctcatgtcaataagtgacttagtcaacacctgggtagaaatcatcactaaagtgagaaagcacatggtgagggggatgaatcctgtgcccacatggtccctttcacctgcccaatcctcaggcctctcacctggggtacccctcacacacatggcactttcctgaactcatggacatttcagtttgtaacgatcctcctaagattatctactttcacctatccacatttgaactatacttctttagtggaaaaaaagaaataaagccagtgctgagaatgatcaaactccagaaatagtagactgctgtataatttgtcttgcgtgacaccagatctttcaaggaactgcaagctcaagtgcacagttaagcaagatcaagatctacctttgtctttcagagccttcccttggcgaggtcaaggatatctgctgtgagcctgggctggctgaaccaaagggcaatggaggcggccaagaagccccagccaactgctcccctccccaacccccttctccctggaggtcccttcagctagaatttgccattttctgtcagggttgtgcatttcttccagtcaccatgacttcctgagatagccaaaagcatttgctgtgagcagagccccatggctggctttgcacatcaaacatttcagacagccatatatttcatagaatacaaggggaagataacactggacacacagaactttccaacagcttgagaaaatgtggtgcctggtgactgactaaatatacaatcggacaacagccaggccatagcaaaagatggaactctgatccacaaggtgcagcaactttcccagaaaacaatacccttacccacaaaaagcaaccccggaagctggcctgctctaaatcagacctgctggaagccaaattgctctctagtaactatccaggaagctaaataataacttctgtaacaattgactcaaaatgttcaggactggattaataactgatggcttccctaatttttgtccccgattccaacttaggacccaccagagaaagccaaatatggtcccctgaccaagcacacaggatgttcgcttctagtgagccgcctccagcttccccgcattgataacctccaatcagggcacacctgaagccttcgcctttttccactataaagctctcccactcgtctgcccacctttgagtctctgccaaattgcaaatgatggtgtctgactcccttgctgtagcaagctctgcataatagcttgtgcttattctctttgggtaggtcttcatttcttttcacaccagataggcatcatctttgaaaacatctttactgggtctcttgtctccctcctgcagccactgatctaaatcacagacttttttagaaagagggaaaatagtaaagaaagaaagcgattgagttgatgctcccagccactgtctgtaccctgaattttgtttttctgccatatgtcaggtggcctctcctggaccatcgtcactgtttctcctgcttccctgcagctgcagacacaggagcactgtgtaggtctggccttgagcacccacccacccagtacagagccagcccctgctgttctgaatcagtgcagtgaccacttagaacacagtgcccatgcctctgtgatctgaactgctctttccagttccatacaatgttaagaacccacttaagaatgttttaatcattcagtagtttttcgtggtatataataaaaaagtgatttaaatacaatctattttattttagattatatcattaggggttattttacaaagttacctttaaatactattgtaaataaaattaataacaaataagcaaaattcttacttttccttgtttgacaattgacatggtcaatttaatttcctttaaattaattatgcaagaaaaggatatttcctcaagaaaatttaaaatgatatatatttcttggttgggtgccaaatattcattcagaagaagacggaaatttaaatccttgtttctaatttaaggaaaaaactactttcattattggatgtgtgaaattcacccattttgtgtttatctagaaaatctagtttattgtccaaatgttcttattttccccaaaagcatcagttaggagagaagatttccagctgccattaaaatacaattgtgtgcaatgaatacattttgggtatagatagtttttattctctataaatgaaatgccaaattggatagaaccatcctttttttttttttttcaaaaaaaaaaggcttttggagtatcagagacatcctcttatgttattttaaaataaataattatttgagctgtttgcttcttggaagcagataacaagggggcaggtgagataaaaaaaaaatatatccaaactgaggtgagaccaaagatggccaatctaagaaccaggcagatgtctctgcctgtcctgggaagattccctcaccaggctccctcactggccagaggagcccacttgttgggctgccaactggttcctataaattctaaggcaattagaatcatgtggtgactgtaacgggaatgacacagctgcccaggcattagaaggaaaccacacccaatggctcaagccagtggcgagagataaaaactgagagacatctcccctgactagcagactgggctccctgcttccccattgcttcctttaaacaggccattcacacatttgcctgaaaacttacagtggcccagaccctactccctatacacactgccagttgccatgtgccttgtttctctctctctgcatgatgcttcattcctatctggagtggcccagggacaaaggactgccctcccgactctctgtgccctccctgcccaggatccgtaaattacactttttgaatttgtttcctactgtggtgtatattgcctttgcaccttccatctgaagaccaggggatgccccaggccaggttttacctgggatgcccaagagagcacaaggtttggctcccagcgccagagcaatgggcaggggggcataaactgaacacaggaaaggcaagagccacaaagacatataaacaagtttcccaggcgaggagcccctggtcacaggtcagacaactaggcattgggccatctaccaggtaaaagcagcatcctatgaaaggcacgcagtaaataccatgtccatctccccttcatttccccttagggcggtttgctagctgttctgggactggaacctcagtttagctgggggctctcagaacagacagctagatgaattaaacaatgaagtctctcagccttaggcacatcttccaggacaaggggaaggccaggggagagtaacatcagtgatcctacaagatgtgcttccaggccaaggccaggttgcagttgcagctacttagccatggtacacggtgggcctggagcttctgggtgtgcaaagatgtgactcaagagtccatctgccagcagtgagcagggcaggccagctctcctctcactggtacggtggttccagccctcacaggacattaaaaccacctggaaactgtttatgaaggttcctatattcaggaaaaatccctagagattctgaccgaaggaatttggtgctgcctgggtaccagtatttttaaatttccccagatgatcctaacatgcagtctgagtgaaaaacccaagtttgacggctacaggaatttagagcttctctaaaacatacagggaataataccagggccatacattggaagtccttccattgggaatgcaaagaaaaaagaaaaagatggccaacatctaccattttaaagggattccagcaagcatattattaaatgcagggctgcctctggcatctggaagcagcttgggtgccctggatataattctcttttaaaagtttttttcacagcttttatagaccacttaaaactggccttcatcttgtgccaaaatagcagggctgtgtttgtttagcttcaagattttcaggtccaattgattaaaaaaggtgagtgagaagcctgccaacacacagtgaggctgtcacccaggcagctgctgctgctggcttccagcatccagaagctggaacatcagccagctccaatcacctgacagaggatggatcctatgagaaggaggaccggggcttaaaaccagacgtacccactgaagtcagggcaggagatgaaaatcttaacaagtgaaggaggtatgaaaacaacagattctagggatcagcaaccaatgaatgagggtccattttttgaaaaacaaatacttctactggctgtcttttgagtgccaggcattaaacaaagtggaagaaaaaaattggagggtgactcaacagatggaccagatcaataatgaggggtaatttgagcaggacaaggctggagctggaagtgcatgcaggatgccagcatcagagcagccaggcatcagagagccagccttgactactcgccgggcctcaggggctgagccttcgtcccaggacaagggagtggccagagcttggctggccccgttccagatgaggactgtgataccagtcaggtcaacgagcaccgatagaggtagggcccaatataggaccgtgtctcacaatggtgcagacccgcagtccaacacacaggaaggatgcttgttgctaagtcttagacacgggaactggaggagggttgagggcccccagcagtgggaaggcaggcatggcatgcagacggtggacgcggactcaagacaccaactctcatcactacaggtccgtggtttggaaagtcccagcaccattccagagaaggaaacaggcccaggtttctgatggggatgggtagtagccacagagcacaagtcagccgcacccaccacacacttgctgtagtgccacactctcggccctagagggcactgacgctttcccttcgctctgccccagggccagggccaaagccatcaagtcctgggcagagggcgggagcgttcagtgagagcagcacagaggttaaagagctgctcttttttgagatcttcgctctcacttcctttccaggcagccagttcagcaaggtgggtctggggctgcctcctgggagaagaggcctttcaccctcgaaccctgcaggacctcagtttgtcccagggcaaacctcctacattgggcagttaggtcagacctgcttcaggccttggaagactgtcttctccttggcttctcttactgcactggatccagccaggacactgatcagacctccagggcccaggttaacaatatgtggcccagctctgggagagaagccagcaggtctcccaggcttttgaactcggagctgaaaaccaaacaaaaaaacgaatccaccccattgacaagtggcccagcctagttggccagtcaggagactgcacaggcactgaggccaaagctgccttggattaagaggtatggatgccaccgctgcccttttactacaggtacactggccgggaacctgtagcactgagtgacacctgatcagagagtcacccactggctgggtctcccccaactcagatgcatggctaacaatcactagctaagcatgtattcactctgtggaaagccacgtcacgttcatatatttattatctcatgtattaatatactgatgtaccacattattctaatttactacctcacttaattcttacaacaacctaatgtgatgggcaatattattattagctccattttacagatgaagaaacaagacctgaaaaggttaaacaacttgcccaagatcatccagccaagtcatgataaagctgcacttgaacacacacttctcagattccaaagcccaagtttctctctactaactgtatggcccctgcactcaaaaactgagaaatctctctgccctggtgagtttcttcctctacgtcagtatgcatagagctcagggctgtactttccttcactagtgatatggtttggatctgtgtccccatccaagtctcatgttgcaatgtaatcctcagtgctggaggtggggcccggtggaaggtgattggatcataggggcagtttctcattaatgatttagcaccagtggaaggtgattggatcataggggcagtttctcattaatgatttagcaccagtggaaggtgattggatcataggggcagtttctcattaatgatttagcaccatccctcttggtgatgctgttgccatagtgagttatcacaaggtccggctacttaaaagtgcgtggcacctcccccacccccctcctcctgctctggccgtgtgaagtgctggtttccccttcaccttccgccatgattgtaagtttcctgaggcctctccagaagccaagcagatgctgccatgcttcctgtacaatttgcagaatcataagccaattaaacctcctttctttataaattacccagcctcaggtatttctttacagcagtgtgagaacggactgatatgtctaggaaggacagcaacaacagaatccacttttgctatcggctttaaaccaaactatcctctgctgaacaggaaaattgaaacagaaatagagaatggaaaaaaagaggtgactaaaacacacttaaggtgtgtacagtgaaaagggagagaaacaatgggctctctaaattacttttcttaatgtgtattacaccacactcaactggatatattaatatcatcatggttcttccaaaaatcaataattacctatctgtagtagatttcctatactagcctacttttcttccttttttcatttctaacatcctagttaattccatgactcccaaggtgttgccacatccatccctctgtgtacaacatggccggattacgcttcctaaagtctggttttaatcatgtcactactccgctaaaacatggtaatggctccctaaaatgctcttatccttagcctacaattcagagctctgtgtatcctggtcctaaccaactctgaagagctaccacaatactaatcctatacctgggccaatctagactactcttcctcctgaagaaatagctgagcttttcctccatattcagcccaggcatatctagctccattccactgtggccaatgggagaacacagctatcaaaaaagaagagacattgagccaggagctcatgcctataatcccgtgactccagaggctaaggctaaggatggcttgagcctaggaattcaaggctgcagtcaactatgatcttacctctgcactccagcctgggtaacagagcaacaccttgcctcaaaaaaaaaaaaaaaggaagggggatcttgtcctgttctctactgcatcctcagtacctagaaccagatctgacacttcctagatgctccatgatatttttcttttcagtaaataaatggaacaggccatttcctctgactgaaaagctctctgtccaggtcttcagttctcaaaatccttctgtctcaataaatactgtggcactttttagagcatggcactgaaactctttgacacacctctcattgagacttgttatagtggcccttcccttgaatcagcacaccaggaatgctggaccaataaaacacaatggaagtaacactgcagtggttataaaaatatgcccaccaaattctttaatactcctcctttggggtaaaacctgtttccttccccttgcctgtgggctgaactgaacttagtgacttgcttctagtcactaagcagaagtgatgctgtgtgactttgaaggctaagtcctaacaagacactgtggcttttttttttttttttttttttttttttgagacggagtcttgctctgtcacccaggctggagtgtagtggcgcgatatgggctcaccgcaagctccgcctcccggttcatgccattctcctgcctccgcctcccgagtagatgggactacaggcgcccgccatgacgcctagctaattttttgtatttttagtagagacggggtttcaccatgttagccaggatggtcttgatctcctgacctcgtgatccacccacctcggcctcccaaagtgctgggattataggcgtgagccaccgcgcctggcatctgtggcttctgtcttatttggtctctctccctcagatcactggctctgaggaaatcagctgctatgttgcaagaggtcctagggcacagctcttgtggcaaggaactgaagccgtctgttaacaacacatgcatgagtttggaagcagatctttcagccccagccaagcctttagacgactgcagctccaaagtgtgtcttaacagcgaccttatgagaccctgagtcagagccacccagctaagtcactctggactcctgtctctcagagactgtgagagataaaggtttgttgtttcaagctatgaagtttgaggagccacttattacacattaatagagatgcataccagtgtctgaattcagaccttaagaataagaaatttccatttcctttctcttgggacacttgctcttggaacccagcagccatgttgtaaggaagccaagctgcctatagagaggcccacatagagagcactcaacagccagaccatatgtatgcaccgtcttgggtgtggattctcccaccccagttgagccaccctagctgtccctgccaagccctgcccaaattgtatttccatgggcaaaataaataactggtaatattttaagtcactacgtcttaaagtgacttattttttattaggcagcagtagataatgaaaatagattttggtatctggatatgggatactattgtaacaaaatcctaaaatcgaggcattggttttgggacttggtagtaggcagaagcctcatgggcctccgtgaaggatagaaaaaagtaagaaaaatatatcagaaactagaaaaaaaaagatccttgtagtggcaaaaaagtcactcagttaccaactgaggcaatataaaaaagagtccctaataattgtagttagacatccaaggagatttccaggcagaatacagaagtgcccactgacctcctgtcaatgcctgtgatgaaatgcaagagaagagagatgaattaaagaataaactgttacatgtaaaggagctagatctggccaggtttgaaaatgaaactaatttgttattcctactctctgcaaatggcaaatagttctcaaattaagaaaggacctcaggccatagatcaaagtcaggatggatgtattagtcctttctcacactactataaagataccacctgagactgggtaatttttaaagaaaatagatttaattgactcacagttccccatggctaggaaggcctcaagaaacttacaatcatggcggaaggcaaggggaaagcaaggcaccttcttcacaaggtggcaagaagaatgaatgcaggaagaactaccaaacacttgttaaaccatcagatctcatgataactcactcactatcacgaaaacagcatgggggaaaccgccctcatgatccaaacacctcccaccaggtccctcccttgaatgtggggattacaatttgagatgagatttgggtagggacacagagccaaaccatatcaatcagtctataaatctaagcgaatcatagaaacttgaagagagacaaaagaccccctaagaatcttaaggacctcccttaagatcctctccattcagggcagatcacaaggtcaggagattgagaccatcctggctaacacagtgaaaccccgtctctactaaaaatacaaaaaattagccgggcgtggtggcgggtgcctgtagtcccagctacttgggaggctgaggcaggaaaatggtatgaacccaggaggcagagcttgcagtgagccgagatcgcgccattgcactctagcctgggcgactgaacgagactctgactcaaaaaaaaaaaaaaaccaagatcctttccattcaatagggcttttaagaatcttacctaatggagtgagggtttgcccattctgaaggtattgaaacaggagaaaacagaaatagcattatatgcaggagttgcaaacaaatgttgaccaccttaacactagtatcacctatggggacagcccattgactgaaaggccggtccaccaaagagcatacagagcaaccagaaaatagtgaggtcaaaaggtcagttaccaggagggttaattcaggtcatccttcagcagatcaggcctcaccaattttctcagctgaccaaagagctaaaacaggaaacctgcgccatacgcaatataccatcttgggcattttccctggagtctgaagagagattgttcacattggagtgaggctatctctgctgcctgaattatacatttcttcccttgggcttaacacagactcatccaccggtattcctgggaaagatatattgattaagaaaggcaaaaaccctaactcagaagcaagactgtgttcaatcttctttttttttctctcagcaaatgggcccataatttcaagtaaatggcatgtgaagctgttaagagccaagccccacatttgcgctgccatgttctactggttgtaaataatacgcgtgactgcaccagggaccaaattgctctttagctgccaacattagttgtttaatgatctgaggagcagaagctgccaattattgtattccttcttaaaataccatttaaaacacatacatgtaattattataactttttgttaaatttttatgattcttttgaagctgatgagctctgggtccattcaacctataaaactcagagaactttttgaagctgtcattacataactgggttaaaaatccatatataatacaccgagagagggcctggactttagccccagatctgccactgcttagctaattgagtgaccttaaccaaaggacacatcccgcagcctcaacctccccatcagtccattcggatcacggtctctctcccatctacctaatatagcaattgtgaaaataaaataacaaatccagaggagtgtttgaaagcactaatgataggataagatactgttttcagagactcttgacttcaagctactaattaatggaaaaatcaattccttaataactgccagagtaagagggagcataatcctttgaggattcgccaagtttctatgactagattttcaaactgaggacattaatttgtctcatgttaccatccttccctctatagaaagggtctgatcacacccaataatcctcattcagtatttacagatacacaatgctacatacacatctgctagaatcatatggcacacagagtacatttagtctctaaactcttcaagaaacaggaactagaaatcccaaatacggtactcacttaaacaccttgtgctatattatgtgcatattagtgaaacttcccagaaaagctttcagatgtctgagaatgacataataacagtggaatgttcatcgaggacaaaacacgatgtgctggtagctgtcattattttagttggatagcttcaacgtctcctacactgccagttacctgatatggcatgcattttggcttcaagcaaggctggtagttgggtttcaatatcgttaactttcttcctcagggtgctgcagaatttctcactcatacacacctagggggagagaaatgaccaggaatcatcatttattcagctaaaaatcagaaggcagtggaacagccaggaatacaacaagaagtcaaccgtctgcagcctgtaagagggcctctcaccagaacttagccatgctggaaccctaatcccagacttccaggcttcaaagtgatgggaattaaatttctgttgtttataagccacctcgtctacagtactttgttatagcaactcaaatggagtaggactgtatgcaaacaaaacaacccatttttgatatttgggaaaatctaagatctttaatagtagttggaaattttcagcaaatcctaatattgggtgcgtatcagtatatgtgtgtatccacaatatacagtgtcatacacacacccatataagcaccatctgcattatataataggcacacctgtatcctcaacgttggtgtacagatgcattcatattacccatacagtatgttctgaagatagtcaataaactcagacccaagacagtcctcccatcttttaattctacatagaaatcaggacgcacctgataaacagcagaaaatgtaagagaggccaggtgcggtggctcttgcctgcaatcccaattttgacacactgaggcaggaggatcgcttgagctcagaagttcaagaccagcctgggcaacctagcaagacctggtctctactgaaaatcaaacaaatttagctgggcaaggtagcatgtgtctgtagtcccagctacttgggaggctgaggcaggaggattacctgagcccgggagatcaaggctgagtgagctatgatcatgccattacactccagcctgggtgaaagaacctttgggtgagcagagcagaagtcaagcatttctgggtccctggctccgatgctgtcttacgggcaccacttgttcctaacaggaagctctctttgtacacaagttataattacccatcaaacctgcggctctgtgacctttagcaaaatcactgggtgttgttttcagaaataaattagatacagaaatggagaaaatgcacagagtaactccagacatttttgccaacatcacatccctgattctggcttagctgcggtgatcccttggcgtgtttcctgatctagggtccaagactttctttctctgggcacagagaccggaagagagtccttccaggccaacaggctctcagctgcgttgctctctgctcagcaagctgtcctttttacatttcgaccatggtacaaccacccctcgttcccagaccaactgcaaataatgaatgattcatacccagttctctgccacaacatttagtcataattcacagagtaattgatcctgtttctcagtctgtcaataacttggccaggtataaatacatatgagaagggcttttgttttgtaaactgtggttatcctaactaatgaggacattgactatttaattgactgtgctctcagggaatagtgaagacgtattctgtctgtacacaaaccaaggtcttgctatggcagtataaacgatggataaagtaggcaaaatgattgtcaagccaactgaaaagctttaaagaacaaaaaaacagtcaccaactgttctatttgtgaggaaaccagacattgccctcctgggaagaaaagtaattaatttctcaaattactaccatcctgaaagcattttttttttctttgagatagagtctcgctctgtctcccaggctggaatgcaatggtgcaatctcggctcactgcaacctcaaccacctgggttaaagcaattctcctacctcagcctcctgagtagctgggattacaggcaccctccaccacacccagctaatttttgtattttcaggagagacggggtttcacaatgttggtcaggctggtctcaaacttctgacctcaggtgatccacccacctcggcctcccaaagtgctgggattacaggcgtgagccaccgcaccaagccccgaatgcatctttaagcaaaggctttcaatatgcatagtggcagtcctttttcagtccctaaattgacagctccttttgtagcaaaggccaaaccagtccatttctggggtgtccacaagtcaagacctccactatgacagaagcactctctcctggctcttttaactcatcattgggcctgcaaaatggcttgacaaagtctacatctttttttgcagaagccaggtatcctaagatctagatgtaaaatcaagtcaaacgaaaacttcataggcttctttggaaaatgggaatataaaggtacttaccttagtagtgatttctttaagtgacaagttgagggattttattctttcctggaggctggaagaattaaaaagaggagattggtcttcttggtaaccacaattcaataccactacagttaggaacactgcaaaaagtgaaccttccactggtctgatggacgaagaagtgcaggaggaaagatgatgccaaattggctccatttgactacggaataaatatggtgctaggaaacagacctttcctcccttattatgccttactaaagctagtattacaattttatcatgcccagagtgtacatctactgataacgggaagaacagccaaggtgtgctcctggcagcaaaggattaaaatctgcattcctataacaaccttcccagaaggaaggtctacactgagtagtgtctcaccagcagggaatcaaatagtatctatttgggtagacaatgcaattcagcaaatatgtacccagagccctctgcattcggcattgacatagagcataaaggagagacacatatttaaagtatgtctgagatagcacccccttagccttctcctgcttctcttttctccatagcacttttcatcttgacatatttatttattcatgtaatttctctctctcccactggaacttaagttccatgaaggcagcgactgtctgttgtgtccactcctgcatccccagtgcttaaagaattcctggagcttgttagtaagccctcagtcaatacctgtagaatgaatgaatcaatgcaattaagagtcagatcttattctgaaggttgttacctagtagagaagaaacacaggcatgcaattcgctataatataaagcaagaggaaaaaattactataaggggaatagaaaatcaatactaggagaaaactgctacataaaagctgtcaccaggcagaatattgtctgccttgagcaatggagaaaataacttgtgcagcaatttagaactaggagattggtgggaaagcttaccagaagaggtgaaaagtgaactgggcctcaaagggaaaaaaaaaaagagaatgaaattctagcaagaagataaatctaactggaccaaatggttctcacaggtgagttgtgaaagataaacagggaaatgactatttctggtaggaaaagagagagaaggatggggtggggcctatctgtatctataatgtttgcttatttagttagttaggggccgggcgtggtggctcacgcctgtaattccagcactttgggaggccttggggggtggatcacctgaagtcaggagttcgcgagcagcgtggccaacatggtgaaaccctgactccatctccaaaaaataaaataaaataaatttatttagtcagggaaagaaaatcaaagtaaatatggggtaaattctactatttgtttaatcctagtagtggataaatgagtgttgtatttttaaatatgtttgaaatatttacaattaaaatatttttaaagaaatatcaagggcaagctctagtcagtattaaatgccagactaaggagttttgagttttatccctcaagcaatgagaaatcattccgttttctagcaagagagcaatatgaaagaagtgtttttgttttttagaaaaataattgggctgcactatgagagatgatttggaggaagaaagtctgaatgtgacaaaaccagacaggcctcttcagcagtgtaagcccgtcatggggtccatgggccccgcagagtgatagaggtcagaaaggggagggaagaacaggactggattacgtggatgctcacagcagtgagaacatccattctagagttttccactctttcatgcattcatgaactcactcattcttcaaatatctatctactgggcacccagcaagctaggaacttagagcatgaagacatggttcctgccctcaaccacttactgctgctagaaatgccagaaaatgtaatagatgctagaagaggagtgattacttgattaaatgatgacctgcaaaaggaaaggtcaaggtttctggggtatgtgttgggaggggaagggaaagtgtgcagggtgtcaggaaatctcataccagaggttgccaagtatcggagctaagctgccaatttgctgatttttgtttgtttgttcttcaactgtaagaactatattttgatgttatcacatccaccaatttgtcacttctgagtataagcaaactcgtttcaattgtaaatacctgggaactggtgcaggtccgtactaatcagtcattaccactttagacctactttcaacagaggagggttttccagtccagctgagatcagcccaaatggaagaagtgaggtttgacagaggtggggcatgtgacaccagactcttcagaattcaggagctgccatctgacaaaaattcgtgtactcagtgggaacagtggaaaacaatgtttggaatcctgcctggagaatgctagactctggctggccagggattggatcttttgagagaacataagtcagagtgtcacacagacatggagattggggcagatgaaaccacttagggtggtgagaaggacagagggcatccaacatggacccgtactggttcttcctctgattctaacagcagcaccagctttgggtggctaatgcctgctgcccaaactgaaaaccttccttgggcagaaatgcactttcccttgctgggctcgttagagtccattcaacaaatacatttttaataaatggttcaacacatcattgaacctatatgagcatttaatagtatattataagtaggtgttcccaatcacacacaaagactagcccatgcattaacaattcagataggtagtagatcctcttactgatactgaaattttagctgaccaaaacagcagtgcctttagctaatgcccaacatatcacaaaaaaggaggtcaagcaccatctttccaggggttgacacagttcacttgtctgggctgagatctggccctatcccagaaagaaaatcagtctcctctcagatatccatgttagaggaagggggcagtgatgcagataattaaatgcattgttttatatttaatttgatttataattaatttatgctatattcctttttgcaacagatttgccttcccaattacgttttgctcaggctactattaacattagttgtatccctggggtatatacagaataaaagcaattgttgggggagcagacgatatgaggaatctatatactatgctagtgggtttcaggctatttatagtagaagaattctctcaaaccaaagtttacacagcactataaaacataataaagataacagggaatctgcttttattgaagtggggtgtctggcctagggtacaaagatgtcacattagtcccccaaacatacacacatgttgctgctgccatcacactgtggtccccaaaccgtaattccaggagcaggactacaaaccaaaaaccagaaaataagaccagttcaatgctgacaagcaggagttccgtgtactttaatgagtgaaaccaatccccactttttaaaaaacttgcatattattcataacaaacaagaattatcctctcagatgaaattatgccttaccctagaaacacacaatttgtccaaacaaattagcgaacacattttcagaaacacaccagacctaatttacccaaatgagtatcttcattcaaagtggctgccctggaaataatagaatccaacatttattgaacacttactatgtaccagacactctcccaaattctctatgtagatgagcattttaaattcttattataactctatgaagtagaaactctaattatctacattgtaagacaagaaaatttcatcaaagagactaagagaggtttaagtaactttcccaggggtaaccagctggtaattatgggagattaaacagtaacccaggcagtctaactatctgctctcctaactgttgaacaatactaactaccgctcccagaagctgtgtacctatttaaaatgaactgtcatccagacaaatttttggaattctatttcagaattttgttcaatgtacaatataatcaatatcatgatttgtaaatacacattattctttactcacaaactggtgttccaatcatatgaccaaatttcaccctcaacaaatgaaaccttacaaaaattgagactactgacatgaatgtgctgcacagaacgcacatcagcagcagatgagcctggggggtggctgtggcaaaagaaaattaaatgcaaaggtgcctgtcaccggttgagttgtgtcccccaaaattcacaggttggagtccgaatccccagtacctaagaatgtgacgatgtttggagatagggcttttcaataggtaataaatttaaaataaagtcattagggtgaaccccaatccaatatgactggtatcattataaggagagatgtggaaggccaggcgcggtggctcacgcctgtaatcccagcactttgggaggccgaggtgggcagatcacaaggtcaggagatggagaccatcctggctaacacggtgaaaccccgtctctactaaaaatacaaaaaattagccgagcgtggtggcaggcgcctgtagtcccagctacttgggaggctgaggcaggagaatggcgtgaacccgggaggcagagcttgcagtgagccgatatcatgccactgcactccagcctgggcgacagagggagactgtatcttgaaaaaaaaaagaaaagaaaagaaaagaagagatgcggagacagacacatgtggagggaagatcatctgaagacaaaagagaagacagctgtctgcaagccaaggagaggagcctcagaagaaaccaaccctgctgacaccttgatcttagacattcagccttcagaattgtgagaaaataaatttctgttgtctaagccaccctgtccatggtactttattacgacagccctagcagactcatgcatgtggaattttccatttcttgtggtatgatgagttataggtattattagggcaccgcacactggtgcttcacgatccaggtaaaaagagttgctactccatgtagcagcagcagcaggtccaacagaaaacacggcactcttttgttttcttcagactgacggtttcttttcaatctgcccaactgggagactgtgggctgctacaataaacgtgtgtagaacattaccattcttgtctatagtttaggagctaagtattatgaatggtggctctaagaaaatgttatgtgagaatgtctttgatttttaaaaatgattattatggatttttaaaaatcatttttaaaaatgattacggattatgattttaaaattattatttaaaaatgattcattagaaatgaaaaagggctcccttcaatactcttgcaatatcacaaacagaatgcaaccactgatgtcaaaaatatgagtaataaaaattcaatcttgggggacagattgcttttcagccgtaattagaagggcaaatggaatttaagtcaataacagtcactaatctagataatacaagccaagacttggtcaagggccagaatgagacatttatacaggaggagacagccaggcaattttggttcaatgacttgggagtgagaaactattctaaagataactgatctgaccaaagaactgtctctacttctaccactctgctccaagccacgggcacctctcctctgaaatgctgcaatcgtctctgaacagttcttctgcgttcaccctcactcctctacagtctgttcttgagatgtagccagggtgagccttcacaagcatgtcaaataaaatgccactactcactccatcacacctgagtcgagccaagtctgcaagggcctatatggcccatctctcatctcgtctcttacctcctctcctacagctcccttctttgcttactccaccctggccacagaggcctcctgacagctcctcaaatctgctgtggctggtgcagggtccactgccttgaccttctgccccagcacacataatgggccaaccccctcccacctgcaagtctttgctcacctctgaccctctcagtgaggctggcctgactactccattgacagctgtaaatttcacatccactcgtcttccaccccaatccccaggtcatgttcattttctactaacctacatgtaacttactaatttattatgtttgttatttatttctgccttttactactagaaaaagaatttcatgtgggcaaggatttttggagaagtacttgaagtgtttggtacacagtgtgtacctaatcagtatttgattaatgaacaatactcacattcttgtcttctaagaaataagtg

SEQ ID NO: 3089 - DNA, 2587 bp, Homo sapiens
cactccagaaggagtcagatgcatgcattctgcttcctagaacgaaaaagatggatttgatgtcgtgaaatggcaattctaaaactcaggagatatgttggtgtttctgagctcttactccagtgtccacttgtccatagaatcacctttcacttctggggtcagaggacagctcctggaatgatctctcatcttacggcaaaaaggtaagagaacttggctgggcacagtggatcactcatgtgattcaagcattttgagaggctgaggcaggtggatcacttgaggtgaggagttcgagatcagcctggccaatatggtaaaacccgtctctactagaaatacaaaaaattatctgagcatggtggtgtgtgcctgtagtcccagctgcttgggaggctaaggcatgagaatcacttgaatccgggaggtggaggttgcagtgagccaagatcatgtcactgcactccagcctgggcgacagtgagaccctgtctcaaaaaaaaaaaaaaaaaaaaaaaaaaagaaaagataaaaaagaggtaaaagaacttagtctttagtcctgaatctattactaatcacacaatgtttcatatgcaaattacttaatccctctaaccctcaccagacccacctatacaaagggaatgacagtgccaggcttgaagttaaagctctagaggtgtctgcctaatgaataaatgggtaccacgaatgaaattcaagaactggtgggggttgatgtgtatacaggggtattagagaaactctgaagtttttttcagccttttgtttctgattagagttaccttttaaaattttgttgtgcaatatgggaatattgtaacatttaagagaaagggggaggagagataaagtagagaagcaggttctataaaatggcaacattaagttactctgatgtagcacctgagagtttacttgagtatctcctccaattcagtattttacatcaacctcacaatacccttccacagggagactcatgtactagaaacagtgcagcaacttcactgagaagataaaattccatactgtggttttacgtcaaagtacacattttcagaaatatcactctttaatatatttagcaattgcatggatgatctactatccctgaactaaaattactctctctataaataatctgcaatttggcaggattttgtgcagatgcctcagtgccctcctccttatatgcgtgtgtgtatgaatttattttttgacatttgcattttttattgactcttcgcgactttggcaaggtgaaaggcttgtggtggttagggaccatgtgctagtattgcgagtggtttgaatataatgcctttgccagtgagcaaccgacactgtttagtttctgagtgccattctccaatggattcctattgactctaaaaacatgcttggctagtcgaagaaattatttgaactatgttggagacttcagtcaatggtccagtaatcacactagtcctttcattctaaatgatccatctcgaatgactttatcacatggagttctctcttatgtgatttatcctaataagacagggtacccactgagaatcatcattgtattataggcacagtttacgtaccacctctcactgtgtgctgtgatccccagggaggaacatcagtcttctactataaagctagcattaggatctacctgaggaagctcagcattctcctatgagagtgttcatgtcagaatcaactagaatttatttcacattattgagattctggtgctccctttgaggcaaacatttaaatataaaaatgtgaagagctctgacatgaatctggtgtaatgaccataaataaattactggatcccacaataaaagtgcattttctttttttaatggctaaatataattttcatgtgttttttaaaataaaatcaccattaaaatttaactattttaattattactgaataagtccattttttattccttgtatatgttcacaatataataatatggtcttcacgtacatgtgcatagctgtgtatgcttttatatatatatgtgtatgtgtaaaataagaagaatagagcatcccaaaactcctaacttcaaaatttggtttgttacttcattggccatatatttcacacctaatctgacataatcacaattttatgtagaatttaaaggtaaaaaagatgtaaataaatggataactgcacggttcccaatctgaaaaaaaagtagaataaatatttacatgtcaaaatgtattcgagaattgtttcttgttttaacaccatcatgagagttacaactctgttagtgtatcaagtgttctgaggtctctttccatagtgacagacttttagtgttgtttcattgggaatgggaggttctcaaaattatttgatagcttttttccatgaacatacataaaagcattaggttcttgcagaattggtgctctactgttcttatttttgaaaatattgaattagaaactttgtatacattttctaatgtactcttacttttccatgggtttttgtaggggctgtttgttattttatttatctaag

SEQ ID NO: 3090 - DNA, 9072 bp, Homo sapiens
cacagtttctttatccaattgttgattgatgggcatgtgggttggttccacgattttgcgattgtgaaatgtgctgctataaacgtgtgtgcaagtatctatttcgaatatgacttcttttcctctgagtagatacccagtagtgggattgctggatcaaatggtggttctacttttagctctttaaggaatctccacactgttttccatagtggctgtactagtttacattcccaccagtagtgtagaagtgttttctgctcactgcatccatgccaacatctaccatttttgattctttgattatgaccattcttgcaggagtaaggtggtatcgcattgtggttttgatttgcatttccctaatctttagtgatgttgagtattttttcatatgtttgttggccgtgtgtatatcttcttttgagaattgtctattcatgtccttagcccactttttgacaggattgttcttttcttactgatttgtttgggttggttggagattctggatattagtccactgtcagatgtatagattgtgaagattttctcccactctgtgtgttgtctgtttactctgctgactgttccttttgctgtgcaaaagctctttagtttaattaggtcccagctatttatctttgtttttattgcaattgtttttgggtttttgatcatgaaatcctggcctaagccagtgtcgagaagggtttttccaatgttgtcttctagaatttttatagtttcaggttttaggtttaagtcgttaatccaacttgagttgatttttctatcaggtgagagatgaggatccagtttcattctcatacatgtggctagccaattatcccagcaccatttgttgaaaagggtgtcctttccccactgtgtttttgtttgctttgttgaagatcagttggctgtaagtatttgagtttatttctgggttctctattctattcctttggtctatgtgcctatgacaaatttatttagaagaaatattttcttatcttttcatgctttgctttagatattgctacaaactttatttaatagtaattttaaattttgactagtaaagttatgtgaaccatgtacggcaaaataaaggatttcacttagacttgtttgcagagatagcaccttaagcttccattagatctgtttttatcagctcatcttatctctgagctacctgacactttatctgtctcatcaggtacaatcatttaaaaaccactgagctaggttatcttaaaattttctttaaaatatgcaaataatatatttatcttttttgataaaacatttaacaaacagaagtctcccctttacttcactcttcgaaattccactcccctccccagaggtaacctcttacccatattctctgtttggctctgcgttcatgtttgtttgtgtttgagatggagtctcactttgtcacctacgctggagtctcactctgtcacctaggctggagtgcagtggcacgatctgggctcattgcaacctccgcctccccagttcaagcgattctcttgcctcagcctcccaagtaactgagattacaggcacctgccgccacgcccaactaatttttgtatttttagtagagatggggtttcaccatgttggccagcctggtcttgaattcctgacctcaggtgatccatccacctcagcctcccaaagcgctaagattacaggcgtaagccactgcacccgggctgtttgttttgagaaagggtctcactctgtcacccaggctggaatgcagtggcacaatcatggctcactgcagcctcaacatcctgggggcaagcagtcctctcacctcagccttctgagttgctggggctacaggaatgcaccaccatgcgctgcttctttttatttttttgtagagacaaggtctcatcattttgcccaggcgggtctcgaactcctagggtcaagtgatcctcccacctcagcttcccaaagtgttgggattacaggcatgtgccactacacgtagcttttgtttttcattcaacagtatggagctctttgcatgtgactgtttataatttttctcatcttttttaagtgctttgaaggattccaaagtatatcgatggacatttagtttgttttcagagctttgtagttataagtaatgctgcagtgaacatcatatgtttacatatctaacagtttatataatagataacagatacacaataaagaatagatgtggtaggtgcacatttattttgtaagatactactgaagtgctttccaaaatgtctgaatcactgcacactcccagcagtggggagaatgcgtttttccccagacactcagaaacagtaattaccatagctaatgaatctatgacatcagtgaacacacttggaagagtgagaggattactctattcccatcaccgcgttcattttcacagattcctagggcaccctgcaaaagacattcctggggagatggggccgacagggctccaaccctaatctgacaaagggtccattgtgactactgatgcacaggtgcctgtgtcagggcaagtgaaaggagaaggcacatcagaacagagaaccctctaacctgggaaatctgatctgaaagggtagcaaaaaagaatgtgattgtgactcccatgttaaatacaaaagactcttagcagttgccctgtgttccaagccactatttttgaccaagatcaaatcaatagcctgtaacccacatacttcatgtagaattcaaccagctcaccactgagtgaaaaccacggcaggcactgtactgggctggctaagaaacagccccttccctgaaggatcatacagcccaagatggtagttaggagagtaaatcactcagtgggattggccatgatgggagttggcacagggtaaacacagaaatgagaaactgcagcccaaaagggagggctggagaagaacaaggccttgaagaatgagcaggagttccatggataaagaaggaaataagtggtttcactgacagagaaaaagagtgtatatgaagcatggaagcatgaaacagtatgaccagtttggagaactacaagttgtcaagtgcttgcagcaacgcaaggttagagaggtcaacagatgggtccagggatctataattgccattttgtaaatcaaatcatgttggaaaaataaatttacttaacattcacactaccctcttggttgctgagtcactgaattccagaagcctctggggacaacaactcattgtagcagaggaagagaaaaaagatgctactctgtcctcaacgttactggttagagacagaaccaggctgaagcgacccagtggtcttattcataagggcaagatgaggttctgcgaacagttctccatgtagtggtctttgaatgccatcctaaccacgtatccaggggactgcttttaacatgattgcaatcttataagtacaaatgggccagcacccttcttcctatcctttctaaccacctgcaactcagtaaagaaacgaactctgcaactcccatttattcattcaacaaaatatataggcaggaaaatgtcattacaacgtatgcttctaggcaggatgaaataacaggagtcagattcaccttctacctgataccacagaaaaaacagacaaaatatatgaaatgaagatttttaagacattggatatgagatatctgaaaggtgggaaacaaggagagccctgcttgccccagcctactgccatgccatggagagtttgcatgccatggagcagaaagagggagcaacggtagagcctggggtatctctgaagtgtgatagagctgggtgtaagtagcagaggcagctaaagattacagggcaagggctgagtgtggagaatagctataggaatacaaaaatatccacacccaataatgtaaaatatacaatatctgacatccaatgaaaagttgccaggcatacaaagcagcagacaaagatggttcctaatgagggaaaaaatgaattaatgaaaatcagccagaaataacacagatgatagaattagcagacaaagatgttataacagttactctaattgtactccagtgctcaagaaggtagaggaaagattaagttatagaaacatggtagatatggaaaatactcaaacctgataaggggcaaatatgaaagccatacagctaatatcatacttaatggtaaaatacatttctcctaagattgagaacaagggattgttgcccactcttactacttctatcaacattgtactggttgtttcagccagtgcaaccaggcaagataaagaagtaaaaggcatccagattgaaaaggaagatgtaaaattgttttttttttttttgaagatgacatgattgtctatgtaggaaacctttggaatctacaaaaaattttaaaaattactagaatcaataagtgagtttaacaaggttgcacgatgcaagatctctgtataaaatcaattatatttctatcttctagcaatgaataaccagaaattgaatttcaaaacaataccatcagtgatgcaggaaactctgtgagtttgcaagaggcagaataatgacccccaaatacgcccatgtcctaatccccagaacttgagcatatgttaccctacgtggcaaatggaactttgcagatgtgattaaggacctgcagtgaaggagatttatccaagtggacctaatctaatcacatggatagcagataatttttttctgctctgtcagaggtgtgactactgaagaagggttgcagtgagatgcaattctgctgactttgaagatggaaaaaggaagccgtgatcccaggaatgtgtgtggcctccagaagctggaatgtgcaaggaaatgggttgtctccttggggccctagaaaggaaggcagacctgctgacaccttgatgtcagcccatgtgatctatgctgtaattctaatctatagagaactgtaagataatacatttgttgttttaaaccactaagcctgtggtgattttttatggcagcagtagcaatctgtataggataaatctgcaaattatcagtaaatcctacacactgaatactgtaaaacatagctgagaggaattagacaaaacttagagctatcatgttcatggaagacttgatgttgttaagatgaaaattctcaaattgacctatagattcaaaccaatcccaaacaaaattccagcagattttctagtagaaattgttgattctcaggttcatatagaaatgcaaaggacctagaatagttgaagaaatcttggaagttgaaaagttggaggacttatactacctgatttattataataaagttatagtgaggaaaacagtgtgctaatggtataaagacagacaaatatatcagcagaattgaaaagagtccaaaattagatctgcacacataatacagtcaattgattttcaacaaaggtgcaaatggaattcagtagagaaaggataagcattttcaactgtgatgctggggcaactggatgttcaaatgcaaatacatgaacattaatgaaaacctcacacatatacaaaaactaattcataattgatcaggctgggcactgtggcccacacttgtaatcccagcactttgggaagccaaggcaggcagcttgcttgagcccaggagttcaagacctgcctgggcaacatggcaagaccctgtctctacaaaaaattagccaggcatggtggtgcatgcttatggtcccaactacttgggaagctgaggtgggaggatcacttgagtccagggaggttgatacggttttgctctgtgtccctacccaaatctcatcttgaattgtactctcataattcccacatgttgtgggagggatccagtaggacataattgcaatcatgggggtggtttcccccatactgttctcgtggtactgaataagtctcatgagatctgatgattttatcaggggtttccgcttttgcatcttccacattttctcttgatgccactacgtaagaagtgccttttgccttctgccatgattctgaggcctcccgggccatgtggaactgtaagtccaattaaacctctttttcttcccagtcttgggtatgtctttatcagcagtgtaaaaatggactaatacaggggttgagacttcagtgagccatgatcgtgccactgcactccagcctgggggacacagcaagaccctgctacaaaaattaaaaactttttttaattgatcagtgaactataaagcctctagaagaacatgggaacatctttgtgaccctgggttaaggaaaattttcttagatataatgctaaaagcatgatgcttaagaggaaaaaattaatacgttggacttcatcaaaatcaagagcttaagctcttcaacaggcaccaaaaagaaaatgaaaaaacaagcctcagagagaaaatgtctgcaaaacactttatcagataaagaacttgtatctataatacatataaaactcacaactcaaaaataagaaacctgacaaccatgtttttaaaatggacaaaatatttggacacttcaccaaaaagatatatgggtaccaaataataagaaaacaaccggcagggcgaggtggctcacgactgtaatcccagcactttgggatccgaggcgggtggatcatgaggtcgagaccatcctgagtaacatggtgaaatcccatttctacgaaagatacaaaaaattagctaagcatagtggcacccctgtagtcccagctactcgggaggctgaggcaggagaattgcttgaaccctgtaggcggaggttgcagtgagtccagattgtgccactgcactccagcctgggcgactgagtgagactccgtctcaataaaaaaaagaaagaaacaaacaaagaaaaaaaaaacctatttttttaaatgcgcaaaatgtttgaatacttcaaagacaatatatagttggtaaataagcacatgaaaagatgctcaatatcattagttattagcgaaacacaagtcaaaaccataatgggataccactacatatgtactagaatgtctaaaaattgcaaagactgataatacaaagcactggcagggatgtggagcactgggattttccaagtgtaaaggtggaataatgtaaaatggtactttggaaacagattaggcagtttcttttaaagttaaatacacacacttagcatatgataaagccattccaatcctaggtatttactcatgggaaatgaaagcatgtctattcaaaaaagtgtacaaaatttttcaataacagctttacttgtactagccccaaaccagaaacaacctaaatatgcatcaagagattaatgaataaacaaatgagtatatccatgctatggaatattattcagcaatacaaggcaatgaagtatcagtacttgctacaacatgagtgaatgtcaaaatataatgctgagtgaagaaagcaagaccaaaaaacatgtatactgcatggttacatttagataaatttctagcaaatgcaaactaatctgtggtgacagtaagtcagggcttgtctggagatggggttaggtgggggaaaggtgagagggagggattacaaaagggcatcgggaaacttttggggacgataggtatgtttattatcttgattgtagtgacagtgttacatgtgtcaaacagcaaattgtacattttaaagtatacttgattatatgtcaattatccctcaataaaggtgtgaaaaacgtattgagaatacattcaacaatacagatggttggctaggtattggagataccatgttgaacaaaaaagacaaagcaaggtctctgtcttcatggattttaagatattaagcaaagaatcttcccttccatttctttcatcagtttccacttctgcccacatacttgttctctctggtgattctttattgtgtgacaggagcaaactgttatcaccaacaggatttcttaaatcatcgcctcaggtaagggctgctagagttggttgatctaacagtttgaaactagagtttgcagctatttggaataggatgtaattttcctatttctgtttacagagaaagttataatcatttttgtgcttagaaaaagcccgttcattttcctcagaagagccagcactgggttagtaacaaaggctcaattcaaagacacctaagaagacattaagaagagtatgtgttctctggctacaggtgaagaggctggatgttctatatctacatgtggctttctcttttccctgtgaaccttggggttgggtgtgagaggatgtgagtggtaactaatggcaggtctggggcaagagtaatgaatgcctataggattgactcaggtgctaaggcaaattccttaaacatactggggtgcagaatggtttgtatcagtatggatatgcacacaatccaccaaaaaatggctgattacaggatcggtgaggcattcataggctttatgtttttcttttcttttcttttctgagacggtgtctccttctctcgcccaggctggagtgcagtggcgtcatctcagctcactacaacctccgcctcccaggttcaagcgattctcctgcctcagcctccccagtagctgggattacaggtgcctgctaccacacccggctaatttttgaatttttggtagagatggggtttcaccatgctggccaggctggtcctgaactcctggacttcaggtgatccgcccgcctcagcctcccaaagtgctgggtttacaggcgtgcaccaccatgcccagcccacaggctttaagtcctggcaacagctactcttgactggttggcagcatcaccgtgagcactatgagcagttaagaggaaaattctctctgcagtcagatcacatcctatgtaatggacctttactctacagcagggatctgcaacccccagtaccagtccagggcctgttaagaaccaggccaaatagcaggaggtgagtggtggggggagccagcgagc

SEQ ID NO: 3091 - DNA, 4314 bp, Homo sapiens
ggagtgagtgttgagttataattacgatttatttcttcctttaatgtggaattgtacttaagcaactgttctggaactatgaatttccaagaaaccaatgggatagagggactttctcagaaccagaagacaataaaagaatttgtgtatgtgggttctcatcagatggagtagttgaccagttggttctttcatagttgggactctggatgccgggcccatgagccccagtcttattgttttaatgatagaggaagtcccccaagactcttttcttcaaccaaagtagctttccacacaactctctccttaacaccttagctacttaaccagctactcaagacaggtgctattacctggcttcgacagataaattgcagctcagaggagaaaaatgatccacccagggttgccagctagtcgactgcagacctaggcctcagaactattccatctgagccccgattcccaaacagtcacacagttggctcggctgagcactcaagaagctgtgagtcaaccagcatgaagcatccctgctttcatctccgttctcccctgagctcagggagcagggctttcctcctcagacagtcacactgatcatttcctcttccctgtctttcctgcttggtgagtcatctaataacaacagtcttagtgaataggctagtgtttacaacctgctttattccagcagaacagatttcagggtgaaaataccatacaaacaggcaaaccattggtacctggcttagatctagagtcctctcggaaagtcactagcattcatctgacatttatgctcagttcctactttgttttttttttctccagctgaccatgcacatctttattgacccagaaagatccgttttgtgggggtgaagatgcgactctgcagttgcaggtttaaacaacccctcaaaacctcagggctggtcacttgcttctctggcttggcttctggtcagagcctgcagaccccttaccctgcattaaagcactacggttaggcctagaccctttggtctcatctcttagtttcgtcacagtcattctctcttgtttgttttctgtgagtcttggcctttacttttgttctggcttctctttaacctgtgaatcagcctctgtcctcccttttcttaggtggtgtcgcactccctggccttcactcactgctagtcacctctgcaattaggtgggcttggatttctcattttcttcctctataagtgggcatagcacacagtatcgtggggaatgaaatgagttaacattaaaattatctgtcacttagtagtcatttgactgatagattttttttttttttgctttgccactaaagaaagttaaagttaagaagttgagtgactggcataggatatggtagagcagggatcctcaatgatgagcaatttgccccccctccaggagatatttggcaatgtcaagagacatttttggttgttgcaattggagggaaggtacttttgggtatctagtgggtagagactagggatgctgccaagtatcctgtaatactcaggacaaccccatacaacaaagagtcatctgactgcacatgtcaatactgggcaagtttcaagtctctactatggatgatcaactgtatattttgggctctgaggcatatatgactactgttttgaccttgtaatattaacatctgtatatcaacaacaaaatcagtgttaatatcaatatcagtattaatgtactagccaaaagtttattaaatacttattatttgccatgaaaatacatcaataggtaaataatcacaataaaatcttttacatagttacttttatttatttatttttttacatagagtagaaacaagttcagaaaggttaggtgactatcccaagtcatagatagtagagtatgaacccctgtctaactgaggcccttaaatattactctgttctacctttcactgtattatgttgtctctcaatttttgatgtgagtagaaagaagtttgggacaaagcaatcagcaggaggctgtctaggacttccaggagcatgttagaagtaccagctgctggctgggcacagtggctcatgcctgtaatttcagcactttgggaggtcaatgcgggcagatcgcctgagctcagtagtttgagaccagcctggccaacatggtgaaatcctgtctctactaaaatacaaaatattagctggacgtggtggcttgtgcctgtaaccccagctactcggggggctgaggtggaagaattgctggaacctgggaggcggaggttgcagtgagccgagattgtgccactgcactccagtctgggtgacagagtgagactccgtctcaaaaacaaacaaacagacaaaaaaccaaaatgaaaaacaaacaaacaaacaaacaagtaccagctgctatgggatttggaaaatcagggtaatcaaaccctctcttacttactggtgaattctggcctctactaatggatttcacccctctcaagggctgttggggactctctggtgtgggagtgagttggagatccctgggttgctgtattaaatccaacaagggggtgtttctctggacagctactgtcaggggtcaagaaggaatggaggaagggtagaaaccgctgagacagaacaaagcctgttattaacagattctctctttttttctggtgagggtgatagttccgtgagcctcctatgcaggcatgaatacagtggtgggaagcacagaactctgggctccttaattgaaaggagatggaggtgggggacagggcacagatagttccttcccagaagttgctgactctctaacgaggcatttacgagaagcgaaatcttcctgcttgtagtttttcatgggatgacttccgtggcaaagaagtcacatatggagcagcggcctctgttcattgtgcaaaggcctctgaccatctggaccacccaggggctagagttttcctacggagggcaggataaaggagaagggattgacacctcggccccaaggtaattaccagatggcaaagtgcttgttttcactggatgattcagagcaaccgagtcaccccgggaaagccaatctgatttcgtcttcagaatcaagcttttccccttctaagatgtgttcttctctttccctttgactggcagcagtgaagtctgcctcttaggagctgagagagtgttgtctggttcagaaacaccgacagtatgggtcagcatttgctccctccctagcgtggccaggaattctgaggtccggtgtgcctgtacccactgagggagaagcgttccacgtgcgagaagtgagtgagagttcgttgctgtttaattgggaacagcccacttcttgaccctgacgtgctcctcattagagacacaggacatactgctctgaatgtttgaagaggacctcacagacacaggtattgtattaaacaaagggttgaatttttttccccttttagtctcactttcttgctttttctctgtttctatctgatatggtttggctctgtgtccccacccaatctctcctcttgaattgtaacccccacgtgttgagggggggacctggtgggaggtgattggatcatgggagtcttttcccccatgctgttctcgtgatagtgagtgagttctcatgagatctgatggtttaaacgtgtttggcagcttccccctcgctcactctctcctgacatcttgtgaagatggtgcttgcttttcctttgtcttctgccatgattgtaagcttcctgaggcctccccagccatgtggaactgtgagtcaattaaacttcttttctttataaattacccagtctcaggtagttctttatagcagtgcgatggactaatacactatccaaaggcagatgtgtggaatctaatggaatgagaggccatgcagggctgttgggagaaagatatcgacacctccccattctccttccctatgtcacttgtgttcatggtactcactgagctttgtcctcaggctggagtgtgaggctcagccatggcctgggagcagagctcagtgactgtgctgtccagtggattgggcctgtcaccctggactcctcaaaactgtgcttgcttattcatttgacaaacattcattcaagcacattcactgttatgccagacatgttggtagttggagattaaattattgaaagaatttttttctagcattaaagaactcacagttttgtgggagaaaggcatagtgagtaagaaataattagggtgctgggagttgaacaaggagaacacatgg

SEQ ID NO: 3092 - DNA, 7002 bp, Homo sapiens
aatgtcagtgcccgcccctgcttacaggctggggccatctgtaggcttggacaggaggggtttggggagacatggcctgctgtctgggaaaatattgataacatgttcccaggatgaggcatttctgacccttgttgtggtggaacgtggtgttccttgtactttctcccagcagaatatgataagaggcaggctatttctcatggcctgaatccctgtggaatatttcactttaagcacggtctgtgaaatggcgggggacttacaaaatggtgcagattggactttcttgccttctactttaatataaaaggaagaggggcgttgttgattatctggctgtttcctgtcgaattaggggcactgtaaccagggtttgggttttgaagtagtgggtgttcgactttagagttgttttcctggaagcgctgatactggacttagtggaggagaacgacggtatcaatgtgtttctggatgactgcctggacaagggagttcagcttttgggagactgactgggctatgaaggatggtagaggacagtcttcagcctgagacccatccctagttatatcttctggacagattcctagaagtgggattactggctcaaaagtgtacctttctactctgcagaggctggaaaggcaaaaatgatggctaaggcttccttgcagactgagaacccctggagaatacgaaatggtctttcccatcagacaggaaactcccagcatctcatactcctgtctctccacatcccacgccagaaagatgcaagaaacttcagtttaaaaccaatgcggagttcccagacacagaagatgagcagggacatcctctgagaggaaaactctggtggcttcaggggaatcaaagcaagtccccacttctgtcctctcctgagctgaaaactcagagcaggctgggtgtggcagctcatgcctgtaatcctagcactttgggaggccaaagtgggaggatcagttgagctcaggagtttcagaccagcctgggcaacatagggaaacctcgttaagtattaaaacaaacaaacaaacaaaccaccaaaattcagaggggacaggggaggtggcacactgctgtccttctttttcccctaccatgtagcacagggcctgtggaatggaaggggcgctgtcaatgtgtgttgggtgatggactggatgaataaatggtacatctgtgtgcctagggggcccattccagacaccaggtagtaaggcagccagatgagttctaggcctggccttcgagagactctgagatgatggacaagctgcttgtctgggccccagtcaactcaccactggacagatctctgagagatctgtggccccaagtttctagagcccaggctttactactgagaagatccatggacgtggggaagcacctactcatagtccctcagagagtctgtgtttggtttacattgaagccaggcatagtgccatgtgcctgtagttctagctactctggagggtgaggtgggaggatgggagcccgggagttcaaggctgcagtgagctatgatcacgccactgtactctagcccaggcaacagagtgagaccacctccctaaaaaaataaaaatgaagatgaaaatgaaaaaaaccaaaagagtttgattttctcacaacaaataggtgccctggttagtgatggctgcccattccatcattttttcagtcgactttctgagtctatcaaactgcagtaaattctcctttggcctcaggatggagccaggatcttctccagtcaaatgtctctgaggccagctggggtcagtggaaactgtggggagagggatggggaagagcaggttctatctttgctcacatcctggagttgtttctgacctgcccaggagaggctgcccctccagaactagactcttccttggctttaagatgtgaagtcgagcagctggaaggacagacacctcatctgaccactgttctatggaccaaaggcaggatgagcatggtaggtgcagaggctgcagttggaaacttgaaacccttgcctgggaaatgaagagcaaggccctgatttggaatgaatatgtttaaaataaaaataattacacagagttggaggagctcttaacacagatggagctcaatcatcccaatgtattgatggagaaacaggctcagcaagttcatggcagaaatggggctccaatcctctgtgaggctttgcccggtgccctagctatcagggaacacgaaatctgtccagtgcaaccaccttctctcatcatgtttgccacctgcttaagactctccttcaagtaagcaagtaagcagcatgttcttactgaccacaaagtagccattgttggggcaactctggcagtgaccttgatcgcctctagaatgcaaaatgcacttgacttatgcaaataccaacacttagtggccctttgactgccagggagcattatggacctttcgctgagtttcacttggacatatgaacttctgatctcaactgactcatttagttggagcagggaatcccaatgcctttggaaatagaaaatggatatgactcaggatgaaacatcagtggaaacagacctttcaagattttttaaaaaaatataactactggttagcatagtcataaaattagatagttcttcttccttatttagaaaacagaatacagaccgggtgtggtggctcatgcctataatcccagcactttgggaggctgaggcaggcagatgatttgaggtcaggagttcaagaccagcctgaccaacatggtgaaatcctgtctctactaaaaatacaaaaaattagctgggcatggtggtgcatacctgtagtcccagctacatgggaggctgaggtggcaggatcgcttgaacctgggaggcggaggttgcagtgagctgagatcatgccactgtactttagcctgggtgacagagcgagactccatctcaaaaaaggaaaaaaaaaaaaaaggaaacagaatacaaggtcaggcatggtaactcacacctgtaatcccagcactttgggaggccaaggtgggaggattgtttgaggccaggagttcgaggccagcctggccaacatagtaagaccctgtatctacaataaaagaaaaagaaagaaaacagagtacaaagggtggagtctgggtctccagtcttgtttgtctgcttgtaggtcctgctattccaagtgtggaccatgtaccagctccatgggaatcaccagggagcttgttaaaaatgtaaaaatctcaggctttcccccagacctggtagatcacaacctgtatcttagcaagatcccccagttgacttgtagacacaggaaaatttgagatgtactgcctgagagcaccaaaacatgtcaaacacaaaatagacctgaaacaaaggaagaaaataaagtatttaccatgcttgcattgtaatgagaatgcacgcaataacttcaggacatttatgacaataggaattctttttaaattagtagatggttctttttagaacagctttagatttacataagaattgtatagagttcccatataccgcccccttatcccaacatatacagattttcctcttattaacatcatgaattagtgtggcacacttgttaaaattgactcaatattgatatattattattaaagcccatagtatacattaaggttcacctttgtgatgtgcagttctatgggttttgacaaatgcataatgtcatgtatccaccatcaccatatcctacagaacagtttcactgccctgaaaattctctgtgctctgcctgttcatccctctgtcctcccaaacccctggcaaccactgatctttctactgtctccatagttttaattattccagaatgtcatatagctggagttatacagtatatatccttttcagattgaattaatttatgcctttatgttcctccatgtctttttgtgatttgatagcttatttctttttgatagcttatttcttatactattgctaaatagcatcccattgtatggctgtatcagagtttgtttatacattcatctattgaaaactcttttggttgcatccattttgggaaaatgatgaataaggctgctgtaaacatttgtgtgcaggtttttgagtgaccataagttttcagctctgttgggtaaatacttaggagtacaattgctggattgaatggtaacactatatttagctttgtaagaaactgtcaaattggagcagggtgtggtggcatgtacctgtagtcccagctactcaggaggctgaggcaggagggatttcttgggccgaggagtttgagactggagtatgctataatcacacttgtgaatagccactgcacagatgcacaaaagaaactgtcaaactgtcttccaaagtggccgtgccattttgaatttccactggcattgaatgagagtccctgttccacatccttggcagcatttgtggtgttaacgttttggattttagccatcctcgtaggtatgtcatagttattttgatttgcaatttctaatgacatatgatattgaatgtgttttcatatgcttaactgtcatctgtatgtcttctttggtgaagtgtctgttcagatcttttgctcattttttaattgagttattcattttcttatttttgagttttaggagttcactgtatattttggacacaagtcctttatcagatatgtgttttggaagcatttctcttagtctgtgacttttgtattgttcacaaagcaggagtttcatattttaataaagtccaacttaacatttcttttcccagctccacattcagtggtatcatgttggtaacttgggatcagccatattgggggtatttacactgaagaaattggcagactctacaaatcagggatttccaccttccttacaagagttgattgttaaaccattttatagcacacgactgcctcctatgaactttctattgaatcattccagttggtctattactttagttataactttttttatgtaccagagaagctttttgttttgtgtacatatgtaagatattggtattttatttttcttttgatttaatttctcttggcaaggcatggtagctcatgcctataattctaggactttgggaggcagaggcaggaggactgcttgaggccaggagttccaaaacagccagagcaacatagcaagacctcatctctaaaaagaaaaaaaaattagtcagctgtggtgacatgtgcctgtagtccgagctacttgggaggcttgggtggcaggatcttttgagctgagtagttcgagatggtagtgagccattatcacaccactgcattccagcctgagtgacagagtgagaccttgtcttttttttctgagacagggtcacactctgtcacccaggctgcagtgcagtagcacaatcatggctcactgcagcctctgcctgtgaggctcaagcgatcctcccaccttagcctcccaagtagctggactacacgtgcacaccaccatgcccaagtactttttgaattttgggtagagatggagtctccctatgttgcccaggctagtctccgagtcctgggctcaagtgatcccacctcagtctcccaaagtactgaagtactgagattacaggtgtgagccatctcatccagcaagaccctatctcttggaaaaaaagaataaccaaaatatgtctaaagaagagagaagagggattttccttagtatatatgaagacttaaaaaaaattacagtaattaggccaggtttggtggctcacgcctgtaattccagcactttgggaggccgaggcgggcagcttgcctgagctcaggagttcgagaccagcttgggcaacacggtgaaactctgtctttacaaaaatacaaaaaattagccaggtgtggtggtgtacacttgtagtcccagctactcaggaggctgaggcaggagaattccttgaacctgggaggcagaggttgcagtgagctgagattgcactgctgcactccagcctgggcgacagagtgagactctgtctcaaacaaaaaaaaaaattatagtaattaggcagagtgatattagggcaagtgtagaaaaatagatcaaagcaacataagggaagcccagaaatagatctaagcataggtggaaacttacgtgataaagaaaacattaaaatcagaggggaggccgggcgcggtggctcatgcctgtaatcccaacactttgagaggctgaggcaggcggatctcctgaggtaaggagttcgtgaccagcctcgccaacatggtggaacctcatctctactaaaaatacaaaaattagccaggcatggtgacaggcccccgtaatcccagcttctccggaggctaaggcagcagaatcgcttgaacctgggagtggaggttgcagtgaaccaagatcgtgccattgcactccagcctgggcgacaagagcgagactccgtctcaaaaaaaataaataaaaaataaatacataaaaataaaataaaatcagaggggaaacactgggctgttcaacaaaaggtgctggaatcattgactttccttacgggtaaataaaactaaatttctgcctcatactacacatgaaaataaactccaaatgaattaaaggattaaagccctaagtgtaaaaccccgaaatttagaaccaataggagaaagatactgagaaaaatattgttaaactcatgttacagagaggcatgcaggactttgcaaacaaggtactaaacattactgattgataacttgtatggcatgaaagttaaaagtggtagttttttttttttttttttgagatgggatcttactctgttgcccaggctggagtgcaatggcacaatctctgctcactgtaacctccgcctcctgggttcaagcgattctcctgcctcagcctcctgagtagctggg

SEQ ID NO: 3093 - DNA, 8411 bp, Homo sapiens
ggaagaactctgtaaatagttgtagcagctactgttggtaaatgagtaagctacattccaaaatatctgcagtccttttttaagccccagtgttctaggattctgcctggagggaggatgcttaatttcagataatagctgcatcaggaccaacatgggccaatggggatttccaaagaaggatggtccaaagcacgctgggaaagttggcaggatttgccctaagcatcactgaagttgatgatatgatgagacacagctcatctggtctcaaactatctcccccagcagtcatggtacccaacattttgcaactagaaagaagcccatatctgctaactcaccaagactagaaaccattcttgatgtcactatgatgtacatcattttacctaagatttacttatctacctatatccatccatccatccatccatacatccatccatccatccatccatccatccaacatcaggaaccttctgaaggctaactgcaccatatggtggatatgatggatagattttagtcctctttcgttgttggcactccaaatttgggatgggaattgtcattgagcagctattctgtgctatctagacgctttagacacattatcccacttaatcctaatgacggcactaagagctatagataacaatgtttataaggtaataatagctacgatttattgagtgttactatgtactggccactgtgcttagccttttatatgagatatcacatttaatgtccccaacagttttgagaagaactcttatttctttgatttaccattattgcccagcttcagaaaggttaagtgactagcccaaggtcacacggcacattagaggtcaaagcaagcctctttccctggtctttgtaattccaggttggtcactgtctgcttcactgtgcctctagctaactgattttctcttggagggaggcatgcgggctcccaacctcactagacaatcatgggaggaggaaagacaagggctttctcacagagttaactctccactccttgccccctggggaagggcaccccctcctgagcatcctgacaggtcagcctgcactcaaagtagcctttcggggggcccttgatggctcccagatgggaacgcacacagctgtcaggtgcttccgagagtctctggatcctaagagcactggcggtgtgcctgtaggattaattgcttctctggcttccagcagggaagcggggtgtggtaacatcttggcttggttaaggatgaaggggcaggcacacaggtggcagagagcatgcctctgtagcacaggatcagaggaaactatgtggctgagaacagctcctggtaggtagggaagcccatgaggacctcacttcccctagaaggaagatgtcagaagctgatgtcctttccccctgtgcagttctaaaattatgtaactggaagaggtgccacaggaaaacctgtttctatcatccttattcgttctgtgtggtcttcctccttgtctttcttacaattcttcttccacagttaatttttttcaggcaccttctatatctcatgctctggaaataccaagatgaaccatgcagaccctgaccccatggagttgagagtctggtggtggaagacagacatcatcaaacgctggcacaaataaaggcacatttatttacttgaggggttacatgttaagtcacggaggcacagattctagaggagccagtagcagggcctgagcttggtccagggttggccaggaagctctttcctgcagaagtaatgcttgcactcaggaccaaaagatgaccaggtgaagagtcacctcactccttgaaacctcagtttccttctttgtaaagtgggatgatagtaacacctacattccaggatatttgtgaggataaactgagatgacacaggtgaaaatgagtagtacggagtctggtacatagtcagtgcccatcgtatcatggctttggccatagtccctcgatgtgaagtgaagttcccatagattggaaggcctatcgttgacttagaaactgctgcccaagggacaaagaagaatgcaagcccactatgtgaaatggaagcacacagaaaaggaagggcctcactctgctctctctcttctgtgtgtgtgtgtgtgtgtgtgtgtgtgtgtgtgtgtgtgtgtatgatgagaagtttgcacagagaagctggtgtttaggccaggtcctgaatggtagatagcagtttacaagagaaaagggggaggaagggtgtcagagataaaaggaacatcaatgcaaagtgatacaaggatgagaatgagtgtcatccgccttgtcagatgcctggggaaattccaatgggcacatggaacagatccccaaacaaaacaacctttaataacacaatactattactcctaatggcaataacggcaaaagcaataatcacaatgaccacaatagcaacagccgttaccatgcattgacaggttactctctttcaggcactgtacatgggtaacttcacctgaaatgctgaaaataaatcttgctcattctttcctgggatatagtgaatgacttcatgccctacattgtatgggctacccacataggtgaggaattgaggatacagccatggaggatttttctgttaaacctcagaagggatgctctcaatttctgcaaggctctcctgggcaacatgaacggtccagacaagttcattcatttttttgtttttctggagggttaaatgggggatagagtattcaggaggtaggtttagctcagtccaaggatggctacaaagagctgtggtaggtagtgctctgacaaagagttccctgtcgtggggatattcaagtgtaactcagttaatttcttgttggggatgttctgagcatggtcagaacaaagagaaagggaaattcagggggaattggtctagaagatcccttcaattccaggatgctgtggtttcaggaaggcaggaatgatctaccatgaaaggtttttacaacagtaggaaacatcatcatcttggctttgcctgtctccaggaggcttgaatgtgatttgcataaccacagggggatggatgtcttgatctttcacagtttttttccagcccttagaatcattctggtctttgcttgcaacctcctttagaaccatatcctgagccacctccatccttctcccaaattattgtaacaacttctgagtaggtcccctagcactctataatctaccctccacacagaagcaaaagctatcatataaaataaaaatcggatatattttccccctacagttgtaacttatgaccatagccgtccccaacccaactggttctcccattccacctcccctcacctaatgtgcacaaaccactctcccttcttttctgactcacaaacattcagggcttttgcctttcctctgtctgagccctcttcccctaggactttgcaaggccagtttttttctcatcgttaaattcccagctcaactgtcaccccagacagggctctctgaccagtctccagtcactccatccggacgacccttttaattttcctttcagcatttatctagctgggcctggtgatgtgtgtctgtagtttcagccactcgggaggctgaggaaggaggattgctggagcccaggagttcaaggctgcagtgagctgtgatcatcactttgctccagtctggatgacagagcgagaccctgtctctaaaacataaataaataggccaggtttggtggctcatgcctgtaatcccagcacttttggaggctgaagccagtggattgtttgagcccaggaatttgagaccagcctggacaacaggtgaaaccctgtttctaggaaaagcaaaaattagccaggcatagtggtacatacctgtggtcccagatactcaggaggctgatgtgaaaggaccacctgagcctgggaagttgaggctgcagtgagctgagactgctccactgaactctagcctgggcggcagagtgagaccctgtctctaaatacataaataaaataagtaaagcacttttcagtatctttctggaattcttatctatttgttaacatatgtatggtctttttctgctgctgagaggtgaagccagctggacttcctggctcgagtagggacttggagaacttttctgtctagttagaggtttgtaaatgcaccaatcagcgctttgtgtctagccaaaggattgtaaatgcaccaatcagcaactctgtaaaatggaccaatcagcactctgtaaaatggaccaatcagcactctgtaaaattgaccaatcagcaggatgtgggaggggacaaataaggaaataaaagctgaccaccccagccagcgggggcgacgtggtggggtccatttgtaggttgtggaggatttgatcttttgctcttggaaataaatcttgctgctgcgcgcgctctctctctgggtgcatgctgcttttaagagctgtgatactcaccaggaaggtccgtggtttcattctggaagtcagcgagaccaagaacccaccagaaggaaccaactacagacacactgctatatggtccagctatgtacaaactgaatcaagattctatgtacatcagaatcaagagagagtgagttcttgacatcacggagcggtctacattctagttcatgcggtggacctgctgggtggcctcaggtaagagactcatttcccttatctataaattgagaatcctaactctttcccctaatcaaacccagctggtaaattcccccttcaccgctcccttctcccctcaaagagacaagccgtctttgccatatgcctctttcttttttccacccagaggtacctttcaaatgctggcccagaaaggtgaggcaaggaggggacctggcctccatctctgtgaatcccacagccctcctcctgagatctgcaggggtagcatgaaatatttaaaagctcaaattgaaatcttgttagagccaggtcttgtaaagccaagttctccaaccccagaacatcagtatctgtttgctggtgtcatttagggaccccggctttccaaaccattgactgaaactttctgtcaatccaacacttttagggtaatttaacttaataatacctttgtcggcactggcgcctgtatctgaagggtgattaccatagaagttattttaggttgtttaatggaatgtagtaaattctcaattgacagggcagatcctcaaaatggcttttcaaagtgtttacctttcaaagctttctccctcactttaccgaacttactactttgagccagcgaagacttcataaattattagcaattgttctcccccctgtgttcacatgcatcattaattctttgtaaaaagttcaaactgtccggggcttaattgttatcacttggagaacggctagaaatggatgcaggctgtattatttctgtcaaaaattttgacttattgctcttgatattttacccatcacatcacatcctcggtacaggagagaggaaaaaggagagggggaggagaaagaacataaatgcgttttcttgaaacaaaacaaatataataatacatatatttctgaggagaaaagtcaaggattcatctgacaaaataatagttttaatcctccaaagagagaggaggagggcagcattagggggaaatttctattgtaaattctattgcttcacactgtacttttattctaagttttgaaggttgtataattctaggaatctaatgtttaacgattctgagatattgaaattttatgagtccaaattcccaaggtgtttgattttaaggataaattaatcccaccgtccagtattcaggactgctaaaaagtatagtagaattagaaagatattgacaataaccacagaaatagctaagctttgttgagaccttaaccatatgcaggcactgtgctgagtgcttcatgtgcagcaccttattttattttattttattttattttatttttttgcttttgctaattttttaaaattgtactttaagttctggggtacatgtgcagaacgcgcaggtttgttacataggtatacacatgccagggtggtttgctgcacccatcaacctgtcatctacattaggtatttctcctaatgctgtccctcccctagcccctcatcccccaacaggccccagtgtgtgatgttcccctccctgtgtccatgtattctctttgttcaatgcccacttatgagtgagaacatgcggtgtttggttttctgttcttgtgttagtttgttgagaatgattgtttccaggttcatccatgtccctgtgatcccattactgggtatgtgtccaaaagattataaatcattctactataaagacacatgcacacgtatgtttattgcagcactgttcacagtagcaaagacttggaaccaacccaaatgcccatcaatgatagactggataaagaaaatgtggcacatatacatgatggaatactatgtagcagcaccttatttaatcttcatgtcactgtaaagtaggtactgttattaaccccttatatagctgggaaaactgaggcacagagagggtaagtaacttactcagggacacacagctggtaaaaagcagagttaaactctgacttcaggccctgtgtgtgtagaacttaacgtatattgtgccccatctcaagacactgctcttttgccccacctggcatgctgtggatcagtgtagaagtgatccacattggtatatgagtctattgtcagactacccctgaggcaacccagccctgacctgctttttgtttgtgttgacgttgctcatccagtccagcagatcaccctttcccatacattctacaaggtcatctcctccaagaaggcttcagtcctgccgcaccatcctttgaatcctcacaacagttggtaccagggaaagggataatgaggcagtctagtaggctggccaaaagcatggactatggggtcagatcccttcggttgggatcttacttctgccagtaaatccatgcgctaagcttcagttaggcaagccatttcagcctcagctttcacatctgtaaaatggatataaccacccctgcctcacagaactgttgtgaagaggaagggaggtgctccaagggagctctgtttactgcttcacaacagtcagtgctgaatacatgttggctgttgttctctcttgtcttgtagtgatctcgtactgagagttttgtacattaaagtataagagtcagtattttttttcctagtcaacatttattttcaatgagatttggaaatttccttaccaaataattcaaggtgaaagtatattaaactatatttttaaaaattgtatttttgacaagtgaccattatatatatttatgaggtacaatgagatgttttgattatgtttatcttgtgcaatgattaaatcaagctaattaacacatcacctcatttacttatcattttttgtggtgaaagcatttaaaatcttgtttttttagcaattttgaaattatatattgcattattgtttattattgtcatcattctgtacaataggtcactgaagcttattccttctgtcagctgaaactttgtaccctttgatcactctctcctctttctctacccacctgcttcccccagcctctggtaaccaccattctacgctctcaacttctttagatttcacatataactgagatcatgcagtgtgtgtctttctgtgtctggcttatttcacttggcctaatgttctccaggttcactgaagcaaatgacaggatttccctcattgtaaaggctaagttgtattccattgtgtacatacaccacatttttttaatccattcatctgatgttggacattaaggttgcttccatatcttaactattgtgaattacatttcaatgaacataggagtggaaatatctcttgggcataggatttcaattcctttggatatacaccccacatggtaatcctatttttagttttctgaggaactcccatactgttttccataatggctgtattaatttactttcccaccaacagtgcacaagggttcactttttccatacccacatcaacttattatgtctttttgataatagtattctaacaagttgtgatgatatatcattgtggttttaatttgcatttccctgatgattagcgatgaccagcactttttaattcctcatttgtccattcgtagatcttcttctgagaagtgtctatttaggtccttagctaattttttgattgggttatttattttcttgttattgagttgtgtttcttatatattttttatgttagctccttatctgatgta

SEQ ID NO: 3094 - DNA, 2810 bp, Homo sapiens
ctagatcctgaccatcctactaatcattagtaccagaaacatcaggatcaatcatcacatttgcaaactaaaaacagtgaaggtggaaattgcaaatcacttccaatccaatagcatgccgtccatggtaatagaaatgaaccacgacaggactggtttacagtagttgagaagacaaattttcagaagcaaatattggcctaaagaaacttccaggaattaggggttctccaaaataatttgtattcaagggtgatatgatttttaaaagttatttgtttgaacaaggagcatttccatttggaaaaaatattcaaacaacacaggaagtacccagtgaaaagaagcctccattacagcactgctccccagagccgggtctccttcctctgaggcaacaactgttactagtatttttgcttatttatctagagatactctatgtatatctcccttttataaacaaatggcagcttgtgatgcatggtgctttttgccttgttttttctgtaggacataattccatacctgtatatacagatctgccttgctctctttggtggcttcagaatacttcattgcaagtgtcccctaactttttgaaccagtcttctaccaatggatatttaggttgtttctaatcttcagcaattaaaacagtgatgaaaggaatatccttttatcatctttacatatgtaagtatatctataggagaaatttctagatgtgtgattgatgggtgaaagggcatatatgtattcacaactttgatagagattagaaatattcctttaaagatgttgaattaatttttactcccataaaacatatatgagagtgcttgtttctcccaaccacttgtcaaattatcatttggtcctttccctaaaatgggaaatgcctttaatgatttttaagctatctgttttgccccaacttcttgcttgctcaggaatcagaaggtttctagattctgctcttatggctactcagagagatttaagaatatcttagttctctctttggcaactgacctaacttttatgcaacaaagaagggagaagagagttaacattcattggatggtctcaaatgtttggtattcatttagctaatacttgttgaacacctactctgtgggctctgttttaggttctaggcatttatcagagaacaatgcggacatagactcctgacctctaggaccttacattctagcaggggaatgagacattaaaaaatatgataaacactcaaattagaaggtggtaaatgtggaaatacaaaaaaagtagaataatataatggagattagaagaacaagaggcaaataaatttaggggattaggtaggatggccagggtgatcctcattgagaaggtaatacttgattaaggacttgatggtgttgggaagtcagccaagagatagctgagagaagagccttccatgcagagattataggcagaatgaaagctcgaaggtgagtgtgtgcttgaggcttccagtgtgactggtgtgagtgggagtgagggagggagagagagaaagggagaaaaggagatagagatttgataaagccttacagggcattcattcagtgaggctgaaatgcagcagtactgcaaggttttgagcacaataaagacaatgatctgatacatgtttcaaaaagtaaagacttttcttttttgagacagagtctcactctgttgtctaggctggagtatagtggcatgatctcagctcactgcatcctctgcctctcgggttcaaggaattctcctgcctcatcctccacgtagctgggattacagataaactcagatccctctactttccaagtgtgagaagattttgttctacagtcgcttctgtgagatcaccacagccctggcaaaccaagagggaggaaccttgtgcctttgaagtgtgattcacagtgcttgataaagtgccagtattctctaaattttaggttcacagcaaattggatggaagttacagaaattcttctatttttaattttaaactaacatacgacaaaaggatttcctgatttatccaccatttcaaaaaaaggtccgaagaaaatgaaggagcctcttcctgtactcatggtacataaggccttcaggagcttccggattaacaccttgtattcccagaacttgttgacaatgggttcatggaggagaaacctgatgtcttcgataaggtaacagaaaccacagaaatcaaaaccgtggataagaggagactacagaaagatttctccttctggagtacatgaatcaaattgcattgaatcaaaagttttgtgaagatttgagatgagaatgagagccaaataagccatatcataagaagctgtgatcagaaataaaatgaggacaatgcttactgtggctttcaaggcaggagaaagcacacccgagggggtcgtgtcccacactaggcagatctaatggtgccacaaaagacaggtgttttgtcagatttcagccacacactttcacacctgcaacgcattaactaccgcagcaatgttaatgaagaccaggtgcctgttctccagcataaatgaggaactggcaggagatttgctgtttgctacctgacgtctacccctgagtctctgaaccccgtccttctggttgaaggggaaggtgtagtgatgtacaaaaaatgattcctgttggacattcaacacgatactccaatgtactttgaacacgtcatgttctgtgaaggtaaaaatgtgacatcaaggcagagaagacatcttgcttaacattttggattcaag

SEQ ID NO: 3095 - DNA, 2394 bp, Homo sapiens
ggatgtgctgggcctgaccagccgcccgctttcctcttctcttgcctctgcctgccccctggtggacagctggggtaaagcatgggagtgcgcctttggggtctcagtggggctgaaatacgactcctcccctaggacagcctgccttccccagccttgttctccggcaaagtcaatttcctggagaatcgaggctctgcctcagatgttcggagcctccgcaggatgaacacctccatttcaattccaggggctttgatcaacctgtgcctcccttgatccccaacttgtgggcaccttcccttgagcagtgcccccacgaggtacacctttcccgggaaacaaaaatcattccttctttgggtcctgcaagctgtaaagaaccaatacagcactgtgctactgaacatgttgccactatagaagccccttgtgttttgaagagtacatctctatagccattcgtttattcatcagaaaccagctagaagccaggccctgtgctgggcgctggagacatggaagaaactgggctgaggctcccgccttgaagagcttgtggcccagggaagggacagttcatctgtcattgattgccacgtgacagtgtctatgatgctaaaaagatgccagtgctgtgctgcaggagcaaaggccgtggaggaagaggctttggctttgttgcgagtccttgccagagccaggcaaagccagtcaccgctttgttcagatgactcaggtaaataaatgaggccgcacaggctgtcctgacaccacacacctctagaataccctggctgtgctgggagctattggtgtcagctgagtattttcatccctgtccaagtcacaatgatctgactgtaccagcctgtgtggatgttgctaagaggaggcagacagcaccatgagctcccttagatgacgatcggcatgatgttcctgctgtggcagcgctcagctcttgccaatgctcttctctgctttgctcactttaagcctcccttaatttttttgaagcccagtttccacattgctgattcacagatatgcaagactcaggcaggaaaaaaaaaagtgtctccttttccagacttcttagaggacttggaaagaaaatgaaatgacgttgaacgaaatcaaagtaaattgagtgatctgaaacgatttgatgtcagcaagaattccccatacagctcacagccctaccccgagcacgcctccctcttgggtatggtgagttcagctccaaatttattctgacaagaaagcacaggcaatggcttcagtgggtctaaatcaggtgaaaattcaaagcaatcacccttcctggacaatcttctgctttctcagtgcttatcatggtctgaaaattcctatttaaagaagcagagctttcttttaagtcctaacagaacaaagtcacactcaacagtgcacaggcacacgccgggatcgagaatgcatttttggcaaaaagtctcctcttttctctgtctcctccagctctctgcaggcccaaaccttgcagaagccattccatgtttcctgagcaggaaaagacaaactcagaccgacaaccttggacttcaaaagactgcacacaaggggaggaaggactgagagtaccaaggcgtgagaattcagaatgctgctatctcatttatttttaccatttaggaaacgttttgatctgcattccttttcccttccctgatttcaaaaaataaaaataaaaatgcttcggttctgaggagtaactctccagatggaaggggaagatcaggggatgaatgggggagggctgcttgcgtcctctcccctgccacacacacgctctctgtttcagccagtgtaaaaatagccgcccaggtttatgtattcatccctaagctgcaatgaagcgcctgcctcccggccagagtccgctgccttttagtagcttataacatcaggtgacgcctccagccctcccattccccgccccagcccggataaacgtcctccgtgaccttagaagttttcagtttaatcagcggtatcgtttttgagaggaaaatcctcccagctttgcgggctggcagggctctggggccctcccctgcctcccagcccaggccgcagagcgagagcgtttccatctgtgctgcgagcgggaagagcctctctgtgctccccggcacgtccagcgcgcgggcgggaacacgctctcctgtggggggcagctttcccagggaccttgcctaacgagggccaggcggctcccccgtgggccccgaatggctcctggcaggcagacccctatccctgtcgagagcactgatttccccagcgtcgggggaggcagccgcgccctcctggagcgaggcaatccagcggtcaggcggcggcgag

SEQ ID NO: 3096 - DNA, 3884 bp, Homo sapiens
acgtttaaatggcaattttatatattgctttcttatagaataatcttagtgttcctaatatatttttaatttgatattcttgggttttgttaggtgtaatcacatcacctaagattggtgataaatatgtctgattctggcttcccatttctgcaactctttttctttctcttatctgattgcattatctagtacctccagagcagtatcaaattatggcacatttttattatgttcttcattataatgagaacaattcttatttccccattaaatgtgatggtggcatttgactttgtgtgtattggtacaaataaaccagatatttttattatcaggagttttttattattaatattagacgagctctgtgtgccattttgcgttaaaggagtatagatttatagaaacatttatttcttaaatagctataagctactttctttgcttgattgaagctgggcatttttgctgttcttttgcttataattaggtctgtaggaaggaagattttgtaatcatgcttcattttgccatctgaaaggaaaagtctggtgggaatattttaattattcatcatggaatctctgtatagcaaatcaaatagagttatgtattttttacttgatgattttgctaatgtggttctaatactcacaacttaagcaaccaaaaacaaccaataatattttaaaacaacataattaattattgcttgaaagtttctaccaaggggcatatggacttctatgagatccaattataaaccaggaaaaagagagatcaacacttgtattttaacacatatgcagtttcttattagcaaaatttcactgataaacatatgctaagttattatagatgtgagccaaaagttctttagaagtaggtatattctgcatttgaactctacagcatttgaaatcacattggctgacacgaattagtattagatctggaaactttgccagtaattcttctagtctccaggaaaagtgaaagcctttcattttggttttctttttggtttgttggttttgctttcatttctgatttttgtttggtggtaggtgcttttatgaaatacttttttaaattacccttactatttattgattaattgttggtaattattaattatctacctttcttagtgtttttcttcaaactctgcaattaggaatacccacatattggaacatttgctactctatctcattccacatgtgtgtgtatggtgtatatatgtgtttacatatttgtgtatattaatttccacaagtattttatgcccataaatattcatgccataatagacttttgttcatttatgatgcaaaaattaactctgaagcaaactgtattcttgcttctcatggtcacatactttctctctctgtctctaagctttgttaacctagtggtaaattctgtggtacccatttgcatgcacacacacaagtatgtatacatggaatagcaagtctctaggggctttgctgaagttaaaccaagaatttcaatatatgatactactactaaacagtatcaggccctgcgaacatgacacattcattgccaacatcaggacacctaatagagtggatactgaccaagggggtgtattcttgcccagatgatacttatttaggcaatgccagtgttggctaatttcacttttccttcatggcctctgtctctctgttacttatgtagcactcattctgtgtcagactgtgttctaagaacttcaactatattaaccttacttaactgttaaaaagacttctgagatagataccatttatccatttcattttcaggtgggaaattgaggcataaggcatttgggcaatgtgttcaatgacaattaaacagctagaaagtgcctggttagctaggatgtaagccaggcattttggttcctgagcccacactcttatacactgtaatactatctcattcatcctgctgtaattattcatttaattacatgagctcctgccagactgcatgttctatgaataaggggccatgtcaatcttgcctgtctttctatcttgtgtcatcataatgcctggtaggtaatagggaatacataactggttttcacttttaattgaattaaagtaaaagtttgtctctataagatcccttttcatatatcttcctgataaaaaacctgtttaataagctgaaaagatgaggtttcattaagaagaggtgatacagaaaaacaacaccatatttttctaacttatgcctcatctggcttactgcttagttcccatttgtcatcagtgcacttaaaaaattattttgaaaaattgccatttttaatatctttggaacttcctaacacattacctattttttaaccaaacgaggtgattccttatgggaaaatatatacagcaagaaaaaaaaaaggaaaaaatgttgatgatacctgtttaattgggaaatatgtttgcatatttattatatctcggaaagaaatgtatgacttattataacagcatttagtcttccaaaatatcagtgactccacagtatatgccttcatttccaaaatgaggggaaaagcattgagtgtatagtacttcctttttttcccccacaaagaaaaaatcatagtggaaattacattgaagaataatctgcacaaaacaaaaaagcacaaatcttatgtttctggttcagtgacttttgataaaggtaacccataattactaacccaatcaagatacagaaccattctgtacctctggaaagttcccatagtctccctcccagtgaatcttccctagtcaccccttggtaaccattgataggatatctatcgcaataacttaattctgcccattcaagaacctcattttaaaccttacaaaaccagaagttattgaaagagatgtgattgtaaccatctttgtttttgtaaggaccacgagttaactacacgtagatatatcatccagagaaaagtcctgataaaagtataatcagtgcaagttgaattcacaggtaaggtttactgtagacgtggaagggtgtttcaaaattactcttgagaaacaggtctcaggctaacagtttctctcacctctgttgcattgtctctttcttttgaataactactgtgtgctgtggtttcacaaacctctcagtaaagtagtgatgggaaaatacttttgttctatgttttgttgacctagtggtaaattctgttacccagctgtcaagcaattagattataataatgaatattttcttaaggcaatttattgggccaaagaaccctgtgaataaatagtagtatcttttattttcagagagcctagttaacatccctccacttgctaaaactagccagaatgtgatattagtgactttcattctattaaataagcattcatgattatcctaaacattcttgccaaatgtgcatatgaaaatagcatagccactgtaattgttaagtcagtcaatttttctcaaggactgtgttgctttaaaaagttagtagtgtttacacattcatgtgattggtctgaagtttacatgctaaataatatttactgtgaaagatgtgtgtgtttgtcagtggatgtgtgcatatattcagatacctaatatgaccaatgtgacaagggaccccatttttttctgccataaattaagggttaatgatagcatttattgcattgagctgctgagaggaccaaatgagataatgcattcagaaatgttgagtgttatttggtttggaaattgataaaaagggcaggtcttacatcgagtgcagctttacaacatattatccatgcatgattacatataaacaaaaatgtttagtttagaaagggaaaaatagtgggtac

SEQ ID NO: 3097 - DNA, 650 bp, Homo sapiens
ctcagaatgtgaccctatttgggaatgagtttgttgcagacataattagttaagatgaggtcatagtggaatagggtgtgtcctacttcggtatgactggtgttcttataaaaaggggaagtttggacatagagacacaaatacacaaggaaagctccatggaagataaaggcagagatttacaagccaaggaatgtcaaagacggccagcacaccaccagaagctagcagagagaagtccctggagagaggacgtgatgtctgaagctatggcagccatcttgtaactatgaggccacaaacaagaaaagcaaaaaccagagtgaagcatggcagagcagaaagatggaaagaacctggatacataagagtgtcactgtgcagctgtacccaccctagactgcatatacctggactttaagtaaatgacaaaatgagcaatatgatcagggatgtgcagttttcaccctgtagcactcttcctttactgcaggcatcatacacagctccaggcaagtcatttttcctaactctgtctgcctaactcactttgtgtagatttttcattgaataccatttgctttctattgtgactatttatacaaatattatagtctctcaagggcaatgattttccatcttttccatcc

SEQ ID NO: 3098 - DNA, 2313 bp, Homo sapiens
acaaggcctgcctggcacggctgccctccttagtgctccactaatgcccggaggacccagacagcgtgccccccatcgatgtcctctggatcaaaggggcccagggaggtgactacttctactcctttgggggctgccaccgctacgcggcctaccagcaactgcagcgagagaccatccccgccaagcttgtccagtccactctctcagacctaagggtgtacctgggagcatccacaccagacttgcagtagcagcctccttggcacctgctgccaccttcaagagcccagaagacacacctggcctccagcaggctgggccatgcagaagggatagcaggggtgcattctctttgcacctggcgagagggtctgactctgggcacccctctcaccagctacaaggccttggactcactgtacagtgtgggagccccagttcccacctctgtgacaataggatcatggccttacccttgaagcattaccgagaaggagaacagagatgggcttgaagagccacgtgctgccggctccaaattcccaaggacaaggatccctctgcatttttgtctatgtaacctcttatatggactacattcagctgcaaggaaaggaaaaccttgattgcagtggtttaaacaaacagaagattgtttttccacatagcatggattctggagatgggtggctaatggtattggttcaacaactccacgaaggtaggggtcacgtcttggatccttttgccttaatctcagtgctcgttacttcatggtcccaagatggctgctgtatccccaagaatcatgtctgcgttcaaggaaggaggggtggaggaagaggaagggccaaactagctggacccgtcaccttctatcagaaagtaaaacctcgtcagaagtctgtttcctgctctctccctctgcatatcttcacttagatgcccttggcccgagccagctaccattgcacctctagctgcaaacaaagctaagacagcagggaacagaattgtcatggctgaatagaccaatcgtgttccatctactgagactggcacactgcctcctgcaataaaactgggatcccattaccaagagagaaatgcagaattgtgtaccagttagcttttgctgtgtaacaaaccatccccaaacttggcagctagaaacaaaccctgtattttcccacaatcctatgggttggcaatttgggctgggctcaacagggcagttctgctgctcacacctgggatccctcatggagctaaggtcagctgttacctcagctgggcctggatggtctaggatagccttactcacttgcctggcaggtgacaggctgttggctggaattgcttggttctcctccatgtggcctctccagcaggctagctcaggcttattcacatgatggcttcaggattccaaagagagtgagagtagaagctgaaagacttcttgagttcttggcctggaactgggactaggacagtgtcacttctgctaagttcttttggtcagagcaaatcacaaggctttacccagattcaagggatgagaaacagactacatgtcttgatgaggggaaccacaaagagcttgtggccatttttcacctatcacaaataattttggatgggtatttatttggataaaggtatttccctcttccccctttctctctgtctcatggggcctcactctgccaagttggaaggcactaagacattgtcctggccctcagggtctaggggaagaggtgttggggcaggaagtgagtctctccatgggctggacccactgtagtaggagtgcctccttgtctgcactgctggtatggggttaggccaggtaggacattccagaggggcttctgaaaaccaagagtccctggggaaagggaacagagtaaggcaggccttgttctcactgccctctaagggaacttggtcactcggcacttttaagcctcagtttctccagttcaataataaggacaagagcttttcccatgcattctctttccccgggaaagttgactgaggtgaccagtaatagaattgaaaagggagagtgtcttcagtgcaatgtggcatcctggattgggtcttggaacaaaaacaggacattagtgggaaaattggaaatctgaaaaaagtctgaattttagttaatataccaatttcagtctcttggttttgacagatgtaccatggtgatgtaagatgttgaccttggggtaggctgggtgaagggtatacaggaactctttgtactatctctgcaacttctctgtaaatctagta

SEQ ID NO: 3099 - DNA, 1769 bp, Homo sapiens
cgggcagctggaagggcatcctgaaaagacgcctgcctgccgccgttctcctggcagcagggcgcgctgggaagcaccaggcaggaagtgaagaatttccggttgtcagcggagggatggggcgtcaccaagtctgtggcaagcacaccaagaaccagctaagtccaaggctcacctgcatggcaaatggtgaagagcccagctcccactgaaggcatatgacccagatcctgagaaccagatgcaccggcctgagctttcgtcagaagcaaggacacacagaacctttcttagaggcatcattagaggaccggacatggtggccagaggctgcagggacagaagtcccagggccatgtccaggaactgggctcaggggacctcctggtgccacctgcatatctgagcccatggagttcctctggtctattcagttctctcattttaacttaattttgtttttgtaggctttcttaaaaaattgcccagttcatttacctgatcacgtttattgttcagagttgagtgtggttctctcgtaattatttagtctccactgggtctgtgattatatttcctttcttattgctaatgctgtttgtgtttgattttcttcttttttttcttggcctgacttaaagaggtttgtctgttttatctttattttaaaaataaccaactgtttatttttacttctccactgtgatttccccctttatttctttaatgtttgagtttatattttttcctatttattttggcttaaattttattatcattttgctatatccttgtgtcaagcgcttaattcaattattttgttattttgacttctaaaaaatcagttaattctataagttttcctctatgtactacattgagcaaactccacagatttctgtagggggcatactaattgtaattcaatttcgttttccatgtgtaggtccagatttatttgaatgtccaaatacttagaattgtaggctcttgttttgttattaaagtctggttttattacattgtgtttagagaaaataatatggaggattttaattttagataaagcattaatatcttttttatcctcaaacatgatcaatttttgacagtgttccaaaaatatactatgaaatatatattatctgttggaatagagtaatatatgtacacactctgccatgtgcatatgtttatatatcatatttagtcaatggtagttgtgttagccaagtcctggagtcatctcgattcaagtttgttgaggcagaattgtcaatttcgtcctcagctcagcttcaactacttaacagaacctgattcatataggaattaagtaaatgtttgttgaatgaaattcagtgtccccaacctttttggcaccagggactggttttgttgaagacagtttttccatggatgatggtaggggatggtttcaggatgattcaagtgcattacctttattgtgcactctatttctattattattacactgtaattaatgaaatgatggtaaaactcacaataatgtagaaatcagtgggagctctgagcttgttttcctacaactagatggtcctctctgggggtgatgggagacagtgacagatcaccaggcattacattctcataaggagtgtgcaacctaatatagattcctcgcatgcacagaccacaatagggttcgtgcttctaggagactctaatgccaccactgatctgacagggggtggagctcaggtggtaatgtgagccaggaggagtgg

SEQ ID NO: 3100 - DNA, 6874 bp, Homo sapiens
aaatgaggacactgaggctcagggagctgggtgatgtgtcaaaagttgcccagctgcagagtggcaatgctggaatttgaagccaggcttttctgattctgaattccatgttttcttacttgcctttttcttctgctccagcttgcagtgcctcggagaggtggcgctggctagcctgggacttccaacatacagcctacattgatggcctgagacttgtggcaaaaaagactttcaaaatctaatttgctcacatacatgaacacctgccaggaaggaatttgaggcctttgttctaaacatggaaaagctgagttcatttgccccagagggggcacctgcagggaaaaggaaaaatggttttaaccctttccttgagtcagaaaatgaggccaccagattctcctttcatccttcaagtatcagaaaggtctgtgctgtgaattccacagatgagattcattgcaagatgtgagggcagaggaaatccatggaaatgatttgctcctccactggctcttcttgtagacacacgactgctacagtatcaagggtctgatgcagacatgacaatgtcaagaggaagaggagagcctcgctcttcccaggcttttgcttttaagagcagaaaaactttccccagagttccaccagctcacttctcatcttacttctttggccagaactggcccttgtgcccatattgtcagtcaaatgccgacaaaggaaaggggccactatgagtggtttagacttggattggatttgtccttattggattgtccttaagtcctttgaaaaagaagtatacaacagaatgaaatcttgactcagctttcaagaataaagagggtgagatgactgatggatggctagcaaaatcagatgtgggctctgtcctcatggagcatacagtcagaaggggaagatttacctaattacactaacaaacttataactgtggtcagtgttctgaaggaaaggaaatccagttgtatggtaacgtataacaaagaaactgaactaggatggagatgggggtggtaagtgtagttggggaagccagggacatgatctgtaagatggctggcctggattcaaattccactccacttacttgctgtgtgattttagattagtcgcttctcctctctgagctcaacttcatctataacaatctttcctagggttgttaaaggattgaatgagccactctatgtaaccacttgacacatattaggcacttcagtggctccttttccagattaaagaaggagaaaacgtgtatgtttggagttagcacaagacaggatgattcctcatgtttgttttggaaaacaagtcttaaactcacagccatgacagagtctgacatcatcagacatcaggcgtgttaagaattgcactcttaattgaaaatgtccagagtttgtgattaattgcaatccttttcagatcctttccctaagaatttaatttttctccccacccacccggaggtcaggcttttaatgtaacaagtacaatcaatcttccactgaagatggcctctctctagtgcaagctggagcaggactcatctggattagaagcctagacggtttggagtcacctggtgaggtttacgtgcacagctggggcccagcctacctaattaggaccagagagtggttgagaaggggaccggcgcgtattctaggcgccctcctccagtgtctgtttctaataatggcagaaagtagcagaggcggcggggtgagcttggagcgtggtgacatcatccctccagctgttttacacatctgtgacatggctcattaggactctcttaacacctcatccttccctgctccacacagctccagttgcatgagaaaaggtgctcttgcatgtgaggggccccaagactggggctgacttcagggtcaaagattcgcttgggcactctaccagtcatcagaattttcacagagacacccccccaacacacacacccgcagcatgcgctccttgaaagtgctaatagcttcaatatgaggctggcacttctgcatgactgttggtgttcagggccagcctagtcttggggagtaggccatctgtagcagctgcagaaatgtttttgcttattttgagcattctaagtttttcctagccatgaataacaacaatcgaataaatcatcccacagtgtgtaggatggtcgtttttttgtttttttttttcagcaagaacaacaaaaaatgacatatcatgtactatggataatacacataaaaaattccgccatatttataggcagcagttaactaactatatttagatatttgaaactgtcttaaatcagatgaatgataaaagcttcctggatttcagtggaaagcctaaatgactaaaccaaaaaaaaaaaaaaaagttttattactatgaagtatagtgcatattctgaaataaaagatatgtgatatttataaaataaaaagagaaactttgtcaatagacagcatcatttaataaagcagggtcccagatttacagacctttgtttgagttctaaaatttactaggaaggagggtgcaggggtggaagccgttcattgtagctctttaaatttcctcacttttgaatggagatgataaaatgcccctcacagggtttttgagaggactaaaaatataaggtatggaaagtgtttagcattgtgcctatcacaaagttagtgcttgaatatattagctattgtcattaatactattgctattcttatttcttctacaactgttattgttgaaatgcgaagtcaaaatggtacatttttatcaactattaagtgctatcatgtttcaattaatacataatgttattgattagaagatgattatagtattgtctctaaggaagaaaaaaggctgcctgttaaaccatggtttaacaaattctggagtacgggcgcagtggctcatgcctgtaagcccagaactttgggaggccgaggctcacgaggtcaggagttggagaccagcctgaccaacgtggtgaaaccccatctctactaaaaatgcaaaaattagcctggcgtggtggcgcacgcctgtaatcccaggtactcaggaggctgaggcaggagaattgcttaaacccagtaggcggaggttgcagtgagccgagattgtgccactgcactccagcctgggcgacagcgacagagcaagactccgtccgccccccctcccgcccccaccctaaaaaaagaatcaaattctggaaagcatcaatcatctctcaggcctttgaaaatgatctaattttgtagatcaaaccctctgtgcttgcaggtaggctcacgaatgcagaaagtgcatgctgtgagccatgctgtacacctcctcattgtccatttctcttctggtatctctcaaggtgtgtggtcaggttaagagattgagacttaagccaggcaggtgttacttcctctcaccatgacaaaacctgggacaatgagaagaggatagattctttcctcccgagggtgctgaggcaggatcagaatctctccctcgggtctgaaacagatcatatagaaggttcaaagctgcaagaaccattctgaaaccataagaatcctgagaacgaagcccacctcatgctaattgtggagaccaagcttatttgagtttacttgagcccttggatccagccgtgcctgaagactttttaataacaggaataaaaaattctattttggataaagcactttgagttggattttctattacttgcagcttaaaagctgaaatggtcctatgtgataagggaatgagacgatgattttgagcatttaatctaacaagaacaacaatactgtgcctgaataccacaacagggaattaggtgttgccttctgacagtatataaaagaactcatttctatcagtttcctgtaatacccatcagaatttctgtctcagaatttaattttctgagttgagctttaatgccatacatggacagtcatatggaattccagaatgtatttattataaaaatatcactgaagatattgttacatgtatcactcagtggtgctttcataagtaaacttctttcagaattcagtattaggagaaacctgagagaaggatatactcttctcctcttctgaaaatatgtgaataactaatcttacattcctgaggctgggtgtggtggcttatgcctgtaatcccagcactttgggaggccgaggcaggtggatggcttgagctcaggagttcaagaccagcctagggaacatggagaaaccctgtctctaccaaaaaaaaaaaaaaaaaaaaaacaacaccaaaattagccagacataatggtgcacacctgtagtcccagctacttggggggctgaggtgggagaatggcttgaatccaggaggtagaggttgcagtgggatgagatgatgccactgcactccagcctgcagaacagagagagtctctgtctcaaaacaccgaacaaaacaaaaaacaaataaacacaaagaactaatcttgtattcctttttgctctggctggctggaagctcagaaccagattaaaaggtcaatttcaagttattcacactaccttgtgattggttcatcttccttttctttggttcttctgtgtatcacacacatcacatgtttttgttttataccaccccaaattcttaatggaagaagcatgttataaacaaacaaataaaatgtgtccataattattaccattgtaaaagtgattatagaagagaaagagctggtaactacgttaacattttctctaagttgaaactgaaaaagtaggcagaggctctcaaatccaggtattgctatgaattataggagctttgcattttcattcttctgatccacacagctctctgtttaatctaacagctggggtccctgaggagatgaatgctttgctccgtggcccaggggtaaaaaagtgatatgaatctgacgggctttggctgcttacttgctatcatgggaccttggacaagtcactcagcttctcttggtctgttttctttggtgtaaaagaggaaatgcttgctacaggaagctgtcgtggagagtgaaggagattccggatgcatggtatctagcacagtgtctggcagattgagcctccaaaggccaggctttgtcttccttatgcagagtgccacctgcttttctgtaccaggggcttctgtctctttacagagccacacagagtcggatgtgactgctgcatcatattggattgcactctggccttgtgttggtcgatctttaccccttagccttcatccagaggcagcccaagaaatagctccgcatatcctgcattccgttcttgtagggctattgtggagacttggtcctctatgtgatttagggtacccagatgaagctctgcatgaatttttatttcagaaataagtgttaaagagaagctttgctgggagttattttctctttacaataaatattaggcaattgatgctcccccacccctacttcggctgctgggaaacccaaaagaaaaaaccttgaggagataaatgacttaaactgagcacccaatctctggaaccatcaagggacaagtaagcttcaccttctggcatggagacactcgcggctgtgggggaggtggagggccagcgaagggcggtgtcaggaggaagagcatgccgtgggagagcccagcagccctcaacattattttctcgaagccttgacatctccccggaatgtaggattttcctcctctagattttggtgattgcagaccatcctatagccaaccaacccccaagtgtgtgagccaccccagccaggatcagcagagccacctggatggcacacagctgactgcagaggcgtgaatgagccaagaccagcagaactcaagagtaataatatatacttattgttttaagccattgagtgtaaggatgatttgttgtaagaacaatagctgatatactctcccagtgtctgtagttatggggtatgcagtaagtgctaaataaatgcctgtttggtggaatgagatagtctcgttaagaacaatagctgatacattctcccagtatataatgagtgctacataaatgcctgttttgtggaatgagatagcctcatggaatggaattgaggatctctattattatgtggctttagggtatttcctagctgacttcaaagtttaaggagggaattagagaagagtgtattcatttgactgtgactcaggagacgtggatgatagtcctaaactgctgcctgtctgtggtatgtgggtcacttctattgtaggcacctcagttacctgacctacaaaatgaaggagagagccaggctggcatgaaagtctcccagaaccttggccaccatcaagcacggaacctgccctgcaaggatgcggctaccgccagagccacccctctatagatgtcacagtaccttcctactgtcccacactgtgctggttgctcctaccaaggcagtctctccattgtccctcttcttggtgtcaccagttccccgctgataatatggagagatggctggtggtgcgctggctatgtaccctgtgagggaggtggagaaagtgagagtctggcctttctagcttcagtagagggaggtggacccccctgtctttcactaagaatcatgaaatcggagtgccccaaacacaggaaggaggctcagatgctgggcagctaaacataggaagaaaaatatccactacgcaaaatccttcataacatcttgagagtccgagaagatgctctcaacgggagtctgtgagccttgacgtgggctcagccaaccaggagc

SEQ ID NO: 3101 - DNA, 1065 bp, Homo sapiens
gcctcctgtgccggcagccaacacagcactggcaaatcagggagctgtcagaaacagctgtccattaacggagtttgtggaaacaaccaggagctgtttgaaaatgctaggtggtagaatttaattggagtagcaactgttcaaaattaagattaaaaggaccagtcagtcaacgtggatttcgtgacaccttaaaaataacgtttcaggtttgattaatgctgcaagaagtttgcacatttctctcctttgctgatagggcctgcgtgctgatagttgattcagtgaatatatgtagcagtgatagctcatgggctccagaggtcagatatcttattctctaggctgaaacccttgttgctttaaggaaacaggattttaataggaatcacatgcagattgactacagggagccaagcggtagtggaagaagcaaagttggcggttttggagacggacgtctatctatccacagtgggacaaaaatgaaggttattgaaaagaatcatgcttggtggaagaagtaattacatttttttttcaaatctcagaggaataatgcttttatatttcctgcgatgacccaatttgcactacgatatgctcccttaaatgtgatttaaacagaagagaggaccaccccgccaaccaaatgtccaggtcctattccatggaacctatgaacaggttgtcccacattgcaaaagggacttcacagatgtcggtaagttaaggccattgagacgaatgattctggattgtctgttgggcccaatgtgatcaaaagtttccctagaagagctagagaagatgcgataatggaagcggaatcaaagacagatttgaagatgctgctgtctttggagagaatggccaggaggcaaggaacacaagcagcccctagaagttggaaaaggtttcaaaaggactggttgaaaactaagatcttaaatcaattcatcgtgttgggaatggagcaggatagagatcgttcctgaaggtaaatataaatttgacattttcccaaaattttacataaacaaaataaagtgaaaaattctgagg

SEQ ID NO: 3102 - DNA, 3673 bp, Homo sapiens
ccgcccgcctcggcctcccaaagtgctgggattagaggcataagccaccacgcccagccaatcgctttttaattctgggatattttaacaaaaagctcagcaagactttttttttttcttaaggtggagtctcgcactgtcacctgggctggagtgcagtggcatgatctcggctcactacaacctttgcctcttgggttcaagtgagtctcctgtctcagcctcccaagtagctgggattacaagtgcccaccaccacgcccagctaattttttgtatttttagtagagacagggtttcaccatgttggccaggctggtctcaaactcctgaccttgtgatttgcctgacttggcctcccaaagtgctgggattacaggcttgagccaccatgcccggccaagactattttttagaaccataaccacaatacagttaccacacttttgaaagtcgatgggaattccttaatatttaaatttctcaataggctaatttttatttttagggatgggggcttgctgtattgacgagactggagtgcagtggctattcctgagtattgtcatagtgactacacctcaaacacctgggctcacatgatcctcctgcctcagtgtcccgagtagtagtgcagggactataggcacttaccgctgtgatctgcttagctcatacattttaaaaaaatagttggttcaaatcaggatccgaaaaagttacataaattgtgtttgattaatgcgtatcttgggtctcttttagatctagagtgtctctcatcttttttaagaaacattatttgttgaagaaaatgagtaattctgtataattccccacattctagactttactgattgtatccccatgatttctctgcctcttgtgtttcctgttaactatagtaactataagttaaatacggaagtttgtgattaaggtgtttttttatttttttttttatttttatttttttttgggagacaagatctttctctgttgcccagggtggagtgcagtggtgccatctcggctcattgaacctctgattgctgggctcaagcaatcctcccacctcatcctcctgagtagctgggactacaggcgtgtaccaccaagcccagccaacatttatattttttgtagagatgggatctcaccatgttgcccatgcttgatttttaataagaatacttcattggtggtatttatagattttgatttatttccaaattgttctttcaaaagtttcattttatctagtcattttacaggacagcttttatcagttcctggtataaaatccttttagcctcagccttataatatgaatatctatacatacataatacttcatacacacacgatatacatatattcccatgtatatatatgtgtgtgtgtcagccacttacatgtcctgttactcttctatgaatcttaaatttgatattgctgttttgaatctacttcatcccctatgccttctatattctctctgcttgaaatctaccctcactatcttgaatgatgaagcctggtgacaactttttagataattttatgtaagataattatttgctaagtcatccagtgacatactcgggtattgtttgtctccctaccagcagcatctagtaggtacttcaaaatcagagcactttattctgtatttttaattttttctgtctttgcctcttacccaggaatgcaaactcagatgtctatccacagaggcctaaagtgggctgtaacatggtttggcaaactttttctgtaaatagccagatagtaaatatttttagcttttgagtagttttgtgggcaactactcaaccctgtactctgctgttgttgcttgaaagcagccatagacaaaccgtaaacaagtgaggctgactttgttccaatttatcccatttctttgcttttaaaaaaatacctgtgtattcgcttagctggagttggtctacaggctgtagtttgctgaccccaggactagaggtttgttgccatgtgtgaatttgtacttaatctactcagattaaaagaaagaaaagctggaaaatcactgtatttgatgaaatatcccattgtataagtgttcccaaattagcctagaatgttatgaaatattatgagccagtaatgtctataggcttatttctgcctgaaggctactagttttatcttgagaatctcatcctcatttcctggcaaaatgagcacagaataaatgcttgttgaataaataaataaatgaacttcatacattattaatttgtttttgttttctcaaactactaggaaattttgtctgtggctaaaaaaaataaaaaggagaatgaggatgaaaactcctcctctactaatctctgtgtggaagatcttcagaaaaataaagattcgaatagtataattaaagatagattgtctgaaacggttaggcagaatactaaattcttttttgacccagtccggaagtgtaatggtcagccagtaccttttcaacaaccaaagcacttcactggaggagtgatgcgatggtaccaagtagaaggcatggaatggcttagggtaatgaattggaatttttaatacaagatactggttttatttctatagtagcctaatgatttgaggtaccacaacttgagtcatttctatcatgtttcactattatacatttgtatgtggatacttgctttctgatttctttaccctgaatttttagaagtagaaattaccttgttaatggcttccagcacttttatggctttgataaaggactttccagtgttgttataatttatggtgtgaatatatcagctttaacataattctcatctttgggtgtgattttttaaagagaagaaataaaatattgtaatcctgtagttgtttatatccaagtttaaatacagtatctattattttgtccagatgctttgggaaaatggaattaatggcattttagcagatgaaatgggattgggtaagacagttcagtgcattgctactattgcattgatgattcagagaggagtaccaggaccttttcttgtctgtggccctttgtctacacttcctaactggatggctgaattcaaaagatttacaccagatatccctacaatgttatatcatggaacccaggaggaacgtcaaaaattggtaagaaatatttacaaacggaaagggactttgcagattcatcctgtggtaatcacgtcatttgaaatagccatgagagaccgaaatgcgttacagcattgctattggaaatacttaatagtagatgaaggacacaggattaagaatatgaagtgccgtctaatcagggagttaaaacgattcaatgctgataacaaacttcttttgactggtactcccttgcaaaacaatttatcagaactttggtcattgctaaactttttgttgccagatgtatttgatgacttgaaaaggtgggtaagccagttatttaatgatttaacctcaaaaatctgtgctgttagttaaaattactttcttttcagtgactgaattaaaatgccaaatatttggcaagttctttgtggtgtatattgtatgttctactcctgccacaaattatgtgagagcagattaagaaaagattatttaaaacttacttgcattgattaaaggaaga

SEQ ID NO: 3103 - DNA, 19331 bp, Homo sapiens
gtattgcctgtttcaaatgtgacagtgtagaaattgagaagctggattaccatcattatctgcctctgttttttgatgggctttgtgaaatgacatttccctatgagttttttgctcggcaaggaatccacgacatgctggaacacggtgggaacaagatcctacctgtccttccacagctcattatcccgataaaaaatgccttgaacctccgaaaccgacaggtcatctgtgtcactctcaaggtcctccagcatctggttgtgtcagctgagatggtgggcaaggccttggtgccttattaccgtcaaatcctccctgtcctgaacatctttaagaatatgaatggtgagtgagcccacgagtcaaaatgtcttttaagccaaagaaaaagggagtggtttgaagtagagttaattagcaacacgtttaggatttattattgcatataaaccatgatccatttggagatctaaatagcatattcccacgccttctccagctactccctagggaaacagtaaagttaacaatttcatttattactcctcaggtacagcttacttactcagtacagaagtgctgaagcagttctataaacttccaataattaaatttgaagtttttttaatggtcttttgaatacattagtaggttttgagtttgttctttttcttcatagtgattctacctttagatacttcctgttacaatttcagtcagcttttttccattggtttaagatgaatttttaagcactattattaaaatctggtaaatggttttgatgattcatttattttttgtagtattattctataagctttggaaaacacagatgaattcatatggctctattttaccctaacaaagatattagcaagtttttggtgacctttggcaggcagtggatgtaaatctattcattaagcgtgtgatttcattgaaatgatgagtctaattttcttttttgttgttaattttgaagttccgtacttctcacatgcatgttataagtcaacatgaagttatttcctgatagtggtatcaataagttagtaatttaatggagcactgaatgaaacttttacaacatgatctgctcatcatacattcaagaaaaaaaatcaaacaagaagctgagtttacagcagctcctgccacaaacagacttttgtttggaatcactattttttatattattactcaattgctattatgtctgctccaggcatagactattcaggaaatcatggaattctcaaaaagcttttagctctctttcagtagtagaaccggcttatatgttaaatactatacatatttagaaaaaggacttcaaactggagttataggagcttacaaatgcctgtaatggagtgcttgcaatggtattctgttcaaattatctgaagagctgtgggtaaggtggacattcaggcaagatggttagtctttacgcaaagtaataactgggttttaataattgagtctcttattgttaaaatgtaatgttttagtaacaatattactacatttggaaaatacttatttaaacagtcttcattcatagttcatatttttaccatatagtagcagcaaatatccatgaagttatgggagactcccgatgtgcacctttttcaactaaggtcgataaaagaaactctaactgcatacctcatatttagattctagtaacttgagggagatagagataaagatgttctgctagagatgagagcattattaaagagatggaagcatcagggaacagccacccccaaatgtcttagttaacatttttgaagtgtgcgattcactaatatttcctcagtaatcctcatgcaaacctatgatgcatgtactattactatttccatttaattgttgcagaagttgcctcttgtagctttcctcccatgtgaacagttattctgtacttgatgatcctggaagatgagcctgaacacatttctcctttcttgcctgagtatctgggaataggtagctactgcaacactgctttaatgcttttgttggtcacacaataaaggctagaacttatatctaagcatcattctgtatccctgtataaaagtagaaaatcagtgatgttcaaaggacaattagaatctttctttatcctcaaggaaatctataaagatggataaatattgctgccgcaaagacagataaatcttgttgggagctctagactactaaacaaaacaattggtttctactgctttctcattatagtttttctttaaacctttaactcacaggtgttcatacacttaacaaagaaaattattgactttaagaataaatccctagtaagattttatcaatgtgggacatttaaagttcatacgagagtccttaattggttccaaactcagctaattcttttggagtctttctaaatgcatgcatcaggaattctacatttaaattatttttctgcttaacatttttctgacatttgtagggaaaaatattatcttccgcttcattttctacttatcttagaaacctgtcacaacaatgccagcctgcagtttgctgtattttcagagggtcctattacaaaattggagcattctagctataaaaacttaaaactgttccttaaagtagctatgttaccctagatccaattctttcagaaaaaaaagcttatcgcaggattttcaattacattagaattttcactaggaaaatgatttagctttaataacattttaagaaagcctgctttatgatatacatcacaaaattatatatacttattttatttaagcagatgtccttagtaacagatataattatttacaattaaaattacattagaaattgacagtatgtagcagtagaaaaaactcatcctaaatttcaatgtatttgagaacaattgcacatttccgtattcctctttttttgtatttctcttttatgtaaatcaatgtcttgttaaactcagattcaaaaatatttctttcaagtcccactacaaaattctttttagaatgagaccagatacaaatgacaaaaaagaatgagagaaaatattctttcaaataaaatgacctgtctgtcagcatcccctcaaagcgcaaacattagattagttctactgcctgaagtttttacaatgtctcctgttttaatgtcacatgaacttcctctgaaataagcagtgggggttgcagagccagggagctagacattgggacagtggcccatgtgaggagcccaggcttccagtcttttcaaggaccagttggaaatcaagtaggggagggaggaacagtccatgctcacagcaccaattcaggccccatctacacgatcagagcaatgaaaacttagagccagccccactagatcattcttgttctagcagagaaagtggctgtatcctcttgtgtgttcataatatttttcacagagtttaattaggctatagttaaaacaagaacagataaatctgagatgtgaatggtagtgtagactaaacagtaacattttggagccagaaaagctgtgacctcaggcaaatcccttaaagtctgtaatcatcaatttttctgtctacacaagatatgcatcgtaacaacttttcattagggtgggcataattagagacaaggtgttcagggcaccttcacatggagcctgtccatgaccgggtattaatgagagagccattatgattacacaacattatatacatatccaatattatatacatacaatagtatatattatagaagaatatcatgctctatgaattattatgtaacaacacaaccaggcaactgaaagtgttgtgtgtgacccatagcgctctctcgttgggtgacctgtcgcttggccctctgtgagcctgtgagtggcatgtggcctcccggtctcaccagctgcatcagtgcctttgcttcaaatggttcattttggctctaattgccaaatgcagggcgagtggccaaataagtgaaagactcagattcattcactggtaacaggttttcaaatccatcctttcctggcataatctctcagcttgaatatgtgactggagtttagggagcatcgtatttacaaaggagaaacctctttccagcacagacaaggaaagcctgggccacggtcctctttgaaaaaaccaaactgctgtctaagcttttgagcttatttgcctgcattctaaacagtgaattttggacgtaaaacatgctgtctttccagtgactgctttgaggggaaagaaaggggagttcctacaaaatattccttggatgcatttgtcatacagccaatagcaatttattctttcctatgttctttcacaaatgttattaaaggttacagaaaattaaaacaataggaatcttcaatttatagctttcagagatgaaactaccaaattaatgatgcagagtattacatttgaggagcatgagccaataaatggcattaaagcttttacagctggaatatgggctccgccagcagattagggctctccgacaggcctgtttaccatattttggttcatttctaacagtaccaatagttctgaaacaatccctacctaaaagatttcagactccagatatcagagactctgataatgttgtaaatttatgtcatgaaatatgcaaaagtaaacataataatgaaatatcctgtccccacgtttgtaggaatcaaattgcttggctttatctaagatgtttaccattatagactaataaaaagttcattaaagagacttaaaattttaattcagatgcaggcacattaaaacatatggggaatgaggatgcctgaagtttgcaaaattttaggatgtttgtaccaggtctttgacctgtaatttaaacggcttctaagaaatagaagtaattattttatgttgatcatcttttaaaacaacttctaaggagaacctaggccttgtaagtcaacctgattcaaaccctccttgataaccctccttgatattcgtgtgaattctctgggaccaattctcatgctcttttcaaacgttgatgaacttctgggaatggattaccaaacaacaacagcagcaacaaaaccttcagtttttctgtcccaaagttgatgtatgtaaatgttatttctcctcacagagatttacatttaattttggaattcaggttcatcccccatggaattctgaacaattctgcgttcatgatttacattttagaaatttacttcgaagtccctttgaaatggttaaatgtgttaaatttgaaccatgagattatcctaaattccttgaggaaattattagaactactgccccccacatttctgaaagttagatttggaattgtcatgcatatatctagtctctctgagcacttcctccatgcacacttaactcatttgtctgcagagaatcctgggattataaagttggaagatccgtgtaggggtcctttggtctaagagtatctccaatttaccaaactaatcaaccattacttccacgaaggcaaaatgtttgtgttggtctttccttttcttatatagagcttggcacacctagtagaatcaggtgcctaatatgtgcttgtgtgaaattagttcactaactcagcctacgcaaccagtacttatttattccgtcttgtccaagcagcctcactacttcatggggtagctgttctacttccaaagagaaaggcagctcctgttttgaaaggaaatttacacctaacatttccatctggttcacctctctcatctaaactacacagcacaatggttaatccttttccacatatagcaagccctcgggaaattatagaaaactttccttccccctcggtattcacttctccaagtgcaatatccctacttcttccaagcattctctataagcagagctcccaaagcctggaaaatctttgaggatggggagggaggactcatttctacagaaacagatggttgtgcagcgatctaagtgagagggcagcccaggacagcagatggtcctgggaagggctcaggcctccctccctcacctgatgcccccacgcgtggtcagcccataaagacctctttaccatggtgaaacctacacatgcttatgaggttaaatgcctttcctcttcactgagactgctacatttgagtctattttcaacccaaatccacttataaaaagcatcaggggagtggggtcagtcacaaactgtaaattacgtctctatgtgctcttctctgtagacctccctggttgcgcctgcccggagggaaggattattctgagttgtctgtaacctggtagggcgatgtctaaagaaatcagaatccagctctgaaggctgtgtcttagcttcctggagccacgtaacaaattaccatacacagaatggcttaaacaacagaaatgtatcgtctcccagttctggaggctacgagttaaagatcaaggtgtggacagggccagctctcactgcaggctccggggaagcctccttcctgctgcttctagcttccggaggtgccagccgtccttgagctccttggcttgtggatgacgcatcactccagtcccgccccatcttcatgtggccttttttcctgtgcgtctgtctgtgtctcttctcttcctatgagaataccagccctcataaggattggattaagggcccaccctactccaatactccaatattactttatcttaactactttcattggcaatgaccctatttccaagtaaggccacatcctaaagttctggaaaagacaggaatttgggggagacactattcaatccagtccagatgatatacctctttcctacagcctgtggggagaaaatctcatctttgataaataaaggtagaggttttgtgttcgtttcactccttcacattgctgtaactagtgttactgagcctgctctgcacggactaatgaaaactccctctttcaacaacaaaaatgtcatgccttttcctttcagcaggaagggtttgtttagttaagaaagaaactgggcctggataagttttgagtaggggagatgcagggaattgatgtttctcttcttcttcggtaatgctgcaaactaaccagagatggaagctcacacttccaacagctctggatgctgccctggggatcccatagcagcaccccagggtgctgccgcaccagcccagtctcgagggacctggccacggtgaggctggttcacctgggcctgtcccggcccaaaccagctgggcaggaggctcaggccactctgcctaaaggggtttgtaccaataaatgtgggtcacctggtggacaagcaggggaagatgcttgggcagatgggataatttgtggagaaacaagaaatgggacaaagcatgcagctgccgagcacagcactgaggcgcaaaggctccggctgcagttcttctgggttcaaactgtttgccggctgtggcttttgacgggtcatgtaacaactccgtgccttagtctccataatttaaaaaccaagttactgggaggattaaagcagctcattgacttgcagagaactataagaaggtcatttttcaggagttctacttggagagaaggaggggaatgaattgtggaatcgagggtaagtgctttgaaactagcgtgttaggtaaatgtctcctacctgcagcacagggtttatggagagaaccaaatacatgtggctttatatggtccttccaagaaaattaagtgaaatctttttaagttaatatcataattaacatctaagatgattacatatgaaataaatattcaagaatcaatacctttcccatatgtcagcagtcagaaatgcaatgcaaagttcattttctagatgctactaattcctaattgcaaatattccaacccagacaaactttcactgctcagctctcccttcccccgaagacagtttagttccttccttggccctctcacatcattgcaaagaagggctgagtagtgacctacgcatagggctgcatcagcaggttcactggcctgccccagtgaactagtgaaatcccaacctctttccactgtgttctgttttcgattggcccttatatttgtggtttctctgtataaatctttccaagttgttgtggccaagtttcctctggacatccccatttcaccagcatctggctttaccactgtccccacttatccaactttacctgaagggatcagactgccaggaggatacagagttgcagataggttcatgacccaggcacatccccattgtttctggaccagtggcaaatgtggtatatcaagaatggcttgtgtaagagaatcccattcattgcttctgaaacggtgatgaaaggtgtcgacaaaaagagtcacactctgtaaaatatttaaagaggcttattctgagccaaatatgggtgaccatgacccagggcacagtctcaggaggtcctgagaacatgtgcctaaggtggttgagttacagcttggtttttatatcttttagggagacataagacatcaatcgatatgtgtggggtatacattggtttggttcagaagggcggtggtttacaggtcatagtgggttcaaagagttcctgattggcaattggttgaaagagttaagttattgtctaaacacctggaatcaacagaaaagagtgtcagggtcaagataaggggctgtggaaaccaggtttcttattatgtagatgaagtctcataggtggtacccttagagaaaataagttggcagatgtagactctccgtaaatctcttcaggactgggagggtatggaatggggaaagatctattatgttaatagagattctttatagacacaactttctccccactaaaatgacttttcagtccatttcaaaatatggcaaagaaagatatttggggtgaaatattttgattttctactttgtctgtcatgtgaggttatgctagagtcaggctggaaagtaagccacgttatatagggttaaatgaaacctctctgatgagattttatggtttgtggggtgtgactccccaggtcccttagataggaatttgggcaagagaagtaaaaggtcagagttcagtcctcaaaaggaactgcagtatggaaacagcagctcaggatggagctggaactggcactcatgccccctgcctgtgtgtggaacaggccatgtgatctgaagcctgcttctcagcctacgagacaccctactgccattccagggactctgggagttatctctgctcttccctccatatccacactcagacatcccatcctttcagtaacctcccctgactccgcccccactagcagaacagagggctcgtccctccgattattcccaatctgccttgctgggtagaggtcctatttcttgtgtccctcctcaccaggcgggagagcccagatgccgggtgacagttgggacaactggcttttggctggacctgttttcaaagccatgtttggaatgtgtgcttttgttacaggaaaggggtcctgatccagatccaaagagagcattcttggatctcacgcaagacagaattcagggcaagtccataaagtaaagtgaaagcaagtttattaagaaagtaaaggaataaaagaatggctactccatagacagagcagccccaagggctgctggttgcccatttttatggttatttcttgaagatatgctaaacaacgggcggattattcatatctcccctttttagaccatatagggtaacttcctgatgttgctgtggcatctgtaaactgtcatggccctggtgggagtgtagcagtgaggacaaccagaggtcactctcatcgccatcttggttttgatgggtttgggccggcttctttactgcgacctatttcatcagcaaggtctttctgacctgtgtcttgtgccaacctcctatttcatcctgtgactcagaatcccttcactgtctggggatgcagcccagtgggtcccagcttcattttacccagcttctatttaagatggatttgctctggtttaaacgcctctgataccttgtcacccctccacccctctgaggtaccccaacagggatccacagacaaaatgactgggttgtggctggtttccagtgcttggccagtgacatccctcctgctagctgggaactggcacatttcccaatcagagattgcgaccaattcagctaaggccttacagatctgcctagagaaatctgtataatatgctttaatgtatttaaacgctcaaaatgggccccaagtgagcaggcatgcacatattcgcccaagagaaaatagcgttcttttctatttatgcaacagaaagttttacttaatctgagcaagaaagcaaatagcaatttctaaagctttaatttaaggaggcttctctattcagtcagctcataatttgtagtttttaagtcccctaaaatatcacctattctggatttgctgataattgagagttcattctgattttcctttatatgcaaatcttccatgagcaccaactaatgactttttaaaggtctctttgtggacattgcagagaaagtaagaatgtcaccaagtgtaattgttatgctgaataccactattcatgccatcgttaaaaggtccgtttaaagggggtgagagacaaaagctaagcttgactggatggaggagcctttccgtgccactgcggaacccctcgcaggggtgggtagtgagggtgagtaaattgttctgccctcccctgagttcccaggctccttgagtcgcacgtgctcttctagagactgatgggaacgctcagcttgcttcactctcagaccttctctccccgcccagcgcggacgggctccgggctaggagctcgcagagggacgggctgtgtcgcctcgcctctccctgcctctgtgtaggaattccccgccgctgaggtcaggagggcgggagtgacacaggagccgtggctgcctggactcctgggctgccccaggagccgaggacagccaggtggaggcggctacggctcggcccgaacccaccacggcctcccctgcagggacctgtgtccagcctccacggccctgcagctgcattcgcctcagcctctcgtgctgggatccctgggcccttctagattcccatcacgcagggtcaaaaatgcccccacccgtgcacgctcaccgtgagaaacccactcccatgccgtgcactgatcgcccggcgtgctgcccggactccagccctgctgcctcggcctttccattctgcaccgcagggaaggcccaggcgtcgcgcggccagcccctggggacaccttcaggctgctcgagagggttccagctgccaggtcaggagcagagcacagccaccgcgccctccaaggacaccaaggcacgtcccgctgtccccccagcgcgtggccagttccccgcgactctttaagcagttctgctggcggtggcccccacacctgcctgggcccacagctcacccaggtcgagggaccctcgtgtcagctccctgccacacctgtggtttgctttctccaaataggaaactgttggagaaatgttcctcttagtatgaaatcagctttccattttattgcctttcttaaaaatctgtaatttttactttgacagaatggaatataaatggctcagaagaagcttaaccatcaataaatgtggagttgaaaaatgcaatggacatattctctagaaaaactgcaaatattattgatattttcttgcttgcctgctttctgtattatattctcatgtacatcttgaattaatgttccaagtaataaagaagaaaggtaaagatggcaacgtaattatgaccaagttctgttcagagccctcgaagatcaatttactttttttgctcttaagtacagtactttaatatgagctttagtgagcatatttatattcattttgaggcggtcatacaatgaaattaaaaatcattctccattcagtgacttttaatttagattttgcataccaattacaactctgcctctgcccccgccccccaaaaaaccctacatttcatcttaagttcatttcttgaaagtatctttgtcacaaactaaaaaactaatgatacaatactggaatttaaaaaacaagatgtaattgggccataatgacaggattattgcctggtaattttcccactattttaagctttgtgtttgacctgcatgctagttggatatttatttgtgtacatcgggttttgaggagttcatagtttttctaacagaaatcactgaatgttacatatgtttgtatgagtctttatttattataaatatgataaacaatcacctaaccaaatgtcttagatgttgttctttctggaagcatattttgtccttccaaagtttcttacaagctgtgagtgtaggataatgatattcaaagagaatcagtaccttttctatttttttgatgaccaactaaaatttctagaagaatttctgttaggaccatagacaaccatggagtgaggagaaggagtgtgatgtcgggcctgtaaaaacctgcttaaaaaacaacccacacattcacctttcttcgtgtacctgctgagctagccactggcggtgtggaacatgaggccttcctgctctcaccgtaagcctggttgcgctgcctacacaaagactaatgcaccaggctacctccaaaagcattagagagcaatgtggtttttatgaaagtcttttttcggggggaatgccaaagagagaaccacataatacatccttcactgattcatttaaacaaaacaaaacaaaaaaagttgagtgcttactatgtgccagcgcagcaaagcttcctaaaaaatcctttaaaaacagacactatgcggccacacagtcattttcaatttaccaaatccctcaaagacttccccagagcctcgcccggtgaacctgaatcaatgtgtacagccacggaaggcctgaggggtgaaggaggttttcactaccgtcgggaaacaagcaggtctagaaaaggatgggaaccttgccacacatggacaccatcctgcaaactttatgttccttctaaccatatatccttaccttctactcctctctttaataacctgactctgaggtcagggtacagtttggaacagtaaaatccagcactgatggcagacttattgaggttgctaaatggcaaaaagagtgctgtttaggcttaatgctctctcttagctaatgaaacagtgaagaactgcaatccaatctcagattttccaccatcaacataaccctcctgcagaagagtaggaatgtcagcttcatcagtgctactaacatgctttgcatcctgggaagatcccaaggagagtctccctctctgggctacctccaaatactgtccatcaggtctctcctgaaatttctaagagtattttttttccaaatctttgctaggagctgcaatgtatatgatttttgctaaatctttgctaaggaccacgtgatgatatgtatatcttgcttataaacccaaccaaagcgcattagagaccatttgtcctgaagctacctaccaactagatttgcgagtccacccaaatgtgtatgacatatggtcagggaggatgatacatcacctgttgcatttcccatcatgaggactgcctaataggtctagtcttgttctaatcttaatagtcctgtgagatccaacagcaatgagctgaaagctagggtttgtttgtttgtttgttgtttgttttaatgtaggtattgttactaaatgtaaattccatgaaggcagggacttttgtcttttttttcactgctttatcaacagctcagcaattgttcttagcacttcctgagattaataaatatttgctgaatgggtggatggagggagagtgtattggttttctattgtcacaaatttagccgcttaggacaacacccacatattatctcacagttctgcagatcagaaatccagcagactcagctatgtaatatgattagaatctaataaggggatcaaagtgtcagttgccctgtgttccctgtagagcttctgaggaagaatccacttctaggctcatcccaggtgttgatagaaatcagttctaatggttgcaggactgaggtctccatttcctggctggttggcagcagtggggagctctcaactgctagaggcggcccacattccctggcccatgaccatctcatcttcaaagccagcaatggagggtttcctatcactcggcctccccttctgccgcatctcatctgccttccttttctgctttcaagggctcgtgtgattcccacccagataaagaagagtattgctcaagtagagtgttaactaatctaactttgttccactttttttttgttacaaggcatggaactatgtggaataatcccttgttttaaggtcagcagattagtaaccttaattctgtttgcaaagtcctttcacaacaataccttgattcatgtttgactgaataacaaggggacggaaatattggaggaacatctgtagaattgaggttttggaatgaagtcatcaaaaaattgatgcctggatgaccatgactgggagcttgaagtacatgttcaagaggatacaaaattaactgccaacatttagtgaaggtagcgcagctcgacactgtattatttttggaattgttattcttactttacagatgaaaaagctgagcattggatcaaatgacttgcccaaggtcacagggcaggaatgaaccaaagccagcacccaagaaataagcaggtcctccttccaaacctgagtggcaggtactctggaagtgtaaattggattgccagaaatagcatttctaaggtaattctgatcaaaagatttcttttatttaaggtactgaagtaaatggaagtttcattgatccgatttaacaactattatatgctggtagatcaaagtagctgttgctgatcttcacaaattcttatgcattatgaagcaaaaatgttttcatatcatcaatttctattgtggagtagtgttcaataatatcttgagaaaaactctaaacacagaaaactatcagcaagttcacctaattaaaaacatcaaacagaatcttctaactttgttccactttttgtgttagaaggcatgtaaccacatggtgtgcattcaatttttttttaatcccagccaaattccttctcagagttatggataaaatctgtgtatgtagctgtcttcgtccatttttgtgttgctataacagaatagctcagactgggtaatttatttttaaaaagaagtttatttggctcatgattctggaggcagggaagtccaagattgcacagaccatttgatgagggtcttgtgctgcttcaacttcaagttgaaaaggatgtaggcaggtgcaaagagaccagagtctctgtgggtctcatggggaaaaatagtaactcgcatgtgattcatttgtacaaattttagtaagatatagagcaagcttacaccttactcttttaggcaatttaatttacacaatgttttcatttctaaatgtaatcctttggtaaaagaccatttgttttaggtgcaattgttcacaatctcttttgctaacaaatcacatagttctcccaacaattctcccaaatataataggtaaacacattaaaaattgctcttgccatgtatacttcaattaccttgccaaattgatatttcaagttaaacacggttgtatattatacagagaagagtgttctcctagtcttaacaataactcattgaacaagtactcttatactatttatgaagtaattcaaaataaggcactaatctacatttactagtacattatggagaagtacttctatgaccctattcctgaaaatcagcctacattttcttagaaatttctacctacttttactagaaatttattgcactagtaagtttttcttgatttcccatattaaaaaaaaataattcattgcaaataaaacctttcctgagtaataatcacttggcatgtaaatgattttagtattaatataattctctctaaataaataacttccaggcccaatgcataatgtaccaagcacacctattaaaatgatagttttgtaatgtgagaatttccattataaaaacctgcgagacacaatctagcacatttaaagaatgatcacttttagattgtaactggaagataaattctaattactatttaatttcttggttgaacatctttggcatgtacaacataaaattgactctgaaattatgcagttaatattatcagcacttagctattccatttgaagctgcaaaggtttaatttgcttggctcaaagaaatattcaaccagaaaaaaaactgcttaaagtttgggaaatttaaaaagtggctatcgatatagttaactaatctataataagctatgttcagtgaaatggctcaacattgggtcattgaaaaaaatggtacattctttagaaagtatgctatttgaggtgttctagaccaggaagataaacatgtttttagaattctattatcaaagctatgggttaatatccaacattgtgacgtgatcctgtgactttagtcaaatcagtcatggaaagttagaaatctcctcccttaaacattgatgcattcttagaattgcttcttgcctaaactatgtttttcaaaaatgtaaatctcagagagttgttcttccagtcacattgctggagtagagatttataatttttaaaatttttaatgagattattgacttgttaatttgtagattattgacttattaatttgtttcaagttcttttgtgttaactgtcttaaaaatggctaacagttatttagtgctttttataggctagattctggattaagctgttttcatgaatcatctcatttaatcctcacaaacccaggaggaagaaagtatccttcctctaatttaacagatgagaaaatgaatgcagagagataaagtaattttcaaactgtcaatcagttagtaaaagggaacttataggattattcaaatggaaagagagataaaaagtgataacttgtacagttttctccatccataaatactgagtgcttcaactgcacctaatggggtatttaattacactgttatagacaaatcattcagctatattggtttaatcttccagtgtttaaactagcagtaataaactaataacattcctaaacttccagtttcttccaaagttatttttattcatgttactaaattaaaaaaagtagtgttcaatactaattatttactgtgatctgttttttaaaacatctgagtggcattattcttggatgaaaagtaaatccaaattcagcctttatgtaatagtatgacatttttacttttggagtttataacagagtttaataaatgtataacatgagcaataatcaagatttttattgcatatgtttattaaagctcacttatagctagttaatagagtatgcgtagattttgctgagttaataaatccaatgcaaagtaccacttgtacatgatgatgtagatagcttcactataggtatcctgaagcatggagttcttcatgcacaatagtttgtcctttgtgtgaaaagataatttgctgaccatttgtgcacggaagtcctcatcatcagcaggacttaacttgagatgattcaagccaattgcaagaaatgctctttagaaagaagaatttacaagacttgctcattaaactatgtaaattaattgtaacttgaaaagaggaaaaaaggctctagtttcacttttttaagtttggggaagatgagttgcaaataatgatcaagaagaaagtcattctgtctaaattagggcatggtggatcttcagcttgaatgtttatcttgagagaatgagaaagagaaacagagagagggagagaaatagataaaggaaaaagaaggtcagtgaatatgatgaaaagcacaagggcattttagtaggtagagagattaaaacctaaaaccatgagggttctttcatattttttaaaatctaatagaaatatgatgagaaagagaaagatgttgaagatatacagaaagaatatcaagtagagccattgatcttaactataaatataaggcagagatgcattgaaaataaaggccacaaactgcaaatgaatgaaaacacttagtatgtcacaaacatgacaaacaaaaagctcctggaatttttcagactgagatggccttatttcattggtggtggatcccagttgagtgtcaaccctcaacgagtgggcagagacccctgcctgaatctcctgagtcacacggcgcacactgcatcccattaggactgatactgttttgcaacagcttaactaatacaatttcaatatttaaccaaaatctgctttcctgtaacgttcccactgggggcttcatttggctgtctggaccgggcctctctgcttcatgagtttccatagatttcttggtgaatattcttctcgtgcatcctgttctttgatgtattgattttcaacaatacatcaaaatcaggtacaaggcagaccttttctttgttggattccaaatgtacaaggactcaatcttgattacatcctaatgctgacgtttctagacaatatttatttgctgttctttgtttccctttgtttctcttgctctataaatttctccaaaatcctaacatgttgtttgaaatttggttgtttcttcttatgcaagtttgcatttcaagttattttatagcctagatatataggaatcctgctttcctccgaatgtgtaaaaattaataactgttaatagtcctctgctatctaagttttaggtttgacataagggaggtggtttgaggctgaagccgtctgatgtggtttggctttgtgtccctacccaaatctcatgtcaaattgtaatcacccatgttggaggaggggccaggtgggaggtgattggatcactggggtagatttccttctttctgttctcatgatgatgagtgagctctcacgagttctggttgtttaaaaatctgtagaaccacccactttgctctcttcctcctgctccaaccgtgtagaaagtgtctgcttgcccttcgccttctaccattgtaagtttcctgaggcctccccagccatgcttcctgcacagcctgcagaaccgtgagccaattatacctcttctctttcc

SEQ ID NO: 3104 - DNA, 863 bp, Homo sapiens
tggaagacagccaccaggagagatgcctgactcacattggactatcatgtggacaagaaataaaatgttattgtgttgagacactgtgctttagagactgtttataagttagcattagtatatctttacaggggaaaaataacttgtttccactgttccaaatacccatttcccataccaaggtatataaaaaaccttgttgtcagaggcttgcttggtaagcatgaaatagaacaaagccctgagagttagtttatttaactgcaattcaacttaagcaagactttttgctttagcttagaatactggaaaaaagttgatattgcaagtaaggtgggaagggcatttaaatggtcatttttgaaacatagggtaccatctaactacctgttcatcttttgatttaggaggaaagaggagcatgagaactcagaagaaattgtacctactcagaagtgtggagtgaggatagacgttcccagattcaaaggcatcatgaagtgtcatgacaagatagaaaagactttgggctggccaagaaggaactggataaaattatgagtgaggtacagcaggtgggaacagtgtcactgaaccctatcaacagcagagcatgagaacgtgaattcctgctgctggggaggcaatgaaatgatatgggccttcagatgtctatgaatcctgacccaccgtgggtgccagttttcaagagggtaagctgtgctacgttttcaccctttgaaacctgcttgttctgcccttctcaagttcccagaagttattactgcctggctgagagattcctgttttacttattttcccataaagaaaccatctcttagcactcatgccctaaggaggac

SEQ ID NO: 3105 - DNA, 6496 bp, Homo sapiens
tctctctgtatttacttggaaatgattcttagaagtttttggcatgggacttttaagtttgttaagtgaagggactagcacttatctatatgcatattttgcaagtatttttaaaaatatggctcaattgttaaatcattttattcgtcccatgacttatataaaaatctgggggttttttggttgctcacttttagtttaggcttggttttatggtgatctgggctcagggaggtagacatgtcaatgtcattagcattgccaaggtataggcagtctgctgcatgctgtgtgaatattaatattctgaagagatatttgagtccacaagatttaaagatcttctgttcaccgctgtgcttgtagaattagggctaaattagtttagcctgggcctcctgggtcttggtcatttgaaaatagctcctcaagtaggctggctatgtgtcttagtatagcagaaacaattcattattcactccatgtgtcgtctattatactgtgaaattacagatgatagttttcttgctttctgtttttccaaacagtgccacctggacttgtgggtttggctcatatactgactgtttcttaatcaagatagctttaatagtcttcaccctacccccatcctccagctgccctttggatgttgctgtgtagaaaccaagagagttcatttttgttgggggctgggctaggttgctaataatctgaagcaccatgaaggattctgacctaatcaaggcataaggaaatgatgtgtgtgtgtgtgtagaaaatttggaactgtgccaggcacaaagtaaatgtcatataagcattagttatgaattgatgaggaggaaggtgtcagaagatgaatgctgtagagaaggctatggggcagtacatggagagagtggttatctgtagagatgtggttttgtcataggtgatgggaaaggtctcagtttgaaggtgatgggtaaggtcttcatttgaataaagatccacaagagagtatgggtagaggggcatagaggtgtccaggtagcagataaggaggtcagataggcaacctagggactcctggacagatgtagcaaattgaaggtttttagaaaacttaaacgggaattttttaatggaaaatttcaaacttaaacatagaatagtacaatgaacaaccttctcccttctcccagcttcggcagttatcaacatggccagttgtgcttcatccatgttgcccactggcattattttaaagcaaatttaagaaattctaccaattatttctatttatcgtccccactgacattctatcagttatttctaaatacttctgtatatatatttctaaaaaataggcacttaaaacataaccacaatacttaactttttttaccttgtttatcatctgtaaatcttggccttagagccttcttgcagcactggttgaaagataagcatggataggccaggcgcggtggctcatgcctgtaatcccagcactttgggaggctgaggcgggtggatcactaggtcaggagatcgagactagcctggccaacatagcgaaacccagtctctactaaaaatacaaaaaaaattagccgggcatggtggtgggcgcctgtaatcccagctacttgggaggttaaggcaaggagaatcgcctgaacctgggaggcagaggttgcagtgaactgagatcatgccactgcactccagcctcggtgacaagagcgaaactttgtctcaaaaaagaagataatcttggatgtctggattccttagggtagggtctgacagtaggtgctcaattgctagtggtcatctgttgtctttaccagcccttgatttttttttttcttttccttttctagatagttctatcatgacaatttcacttttacttcctctttcttctccttacctatttttgacacatttattcagtatttcccgtatctactctctacttctccttttaactttctcctatcctttcagtatttttgttcacagcctggtgtgtagcttgtgctcttttgatccctgtagcccatgaaatacagctccctttagttctagatctttttgaagggagatgagcatttcctattcttattttttaaaaaatactgttactgagattgagatagaatttacatgccaaatgcttcactgatttaaagtgtacaagtctagccaggcatggtggctcttgcctataatcccagcactttgggaggctgaactgggaggattgcttgaggccaggagtttgagaccaacctgagcaacatagtgaggtctttcctctacaaaaataaaaaattggccagatatggtggcacacctgtggtcctagctgctctaaaggctgagacaataggatcactagagcccgggaggtcaaggctgcagtgagccatgatcatgccactgcactctagcctgagcaacagaggccgaggcgggcagatcacctgaggtcaggagttcgagaccagcctgacaaacatggagaaaccctgtctctactaaaaatacaaaaattgccgggcgtggtggcgcatgcctgtaatcccagctactctggaggctgaggcagaagaatcacttgaacccaggaggcagaggttgcagtgagccgagatcgcaccattacgctccagcctgggcaacaagagcgaaactccgtctcgaaaaccgaaaaaagaaaaggaaaaaaagtgtacaagtcagtgattttcagtgtattcacaaatatatgccatcattaccacagttgattttataacattttcatcacctcaaaaagaaacctggtaccctttagctgttcccatcccaccaccctaagcaaccacgaatctcctttctatttcaatggatttgcctattctggacattttatatatatatatatatgaaatgtcttttgtttctggcttttttcacttagcatagtcatttcagtgctcatccatgtcagagcataaattagtacttcatttctaatgatggttgaataacatttcattgtacggatatagcacactttgttaattcatcaattgatggtcatttcatttgtttccactttttggctattatgaatagtgctgctagaaatattcgggcacaagtttttgtgtgaatgtgtgttctcatttctcttgggtatatatatccaggagtagaattattagattaaatggtaactgtatatttagtatttgaggaactgtcagaccatttttccaatatggctttccattttatttgcccaaacatggaaatctagccatttttcaagtgcagctgcctacctttactttgggtaaatttctgtattaatattttttcactgtcttagttatcaaattctgttgcatgtaaatctggttttttttaatatatgtaaagtttttaggtagaatgttaatttagtggtggtccccaaagtggagggcatttacctttaagtgtaagatgattcattggaaagaaagaacaaaattctatttttacatatgctgtatgtatcctaatgtattagcatagctgtacacatgtaaggtgtataaattaatattcttatattagatctgtgtggtgcaaagtttttttatacaagtatgaataataataaaattttgtgaacaattgtccagaggcatgaaatcaaatatacctatgtaggtcttaatcctatattttatgacatgtctgatgggaaagttcttaaaattactttgctaatgaaattgaaaatagcctgctaatttcagcccacacggaatgtgtgaaataccagtggaaacagctttggatcaggttcagacttttgtttttgtcctacttctgctaattactaatggcgagactttgggtaagtcccctaatggtctccatttcagttctcaacttggcataataacacctgaaattttgcaaattataactttgcagaatgagactgggaagggcgtcatatgcagcgaccagagggagttagtcatttgggtgttttgggcaaccctgcagttcttttaggtgaaatattcaattttccatgaactttgccttccccttcttacttacccatttctcttgattgctttctgtccttctgttgtgttcttctgacagcaaaccttcaaaattaatggtcattaccaaaggctaaatcagctggagtggagtcctttgtgataccacccagccagggaaacagtatagcactgtttcctttctgctgcttttattacaacatagtatagagtatatagatgaaataagaaaattgcagtttactgcaattcctggacactgttttggaagctgttgagttaaattattgggcatcttgatggtttctatttgatatgtgatagttttaggctctgttattctctttgggatgtgaatctttgcctaacgtcaaagcatgaagagaagtagatcctgagaaagaagggaagaagttctggggaactgtggtaaccaaacagctcacatgctacagttgaagatttattcatgctctactcagtatttgtttattactggctgtgcttagtaacgtaccataaaattgataaaaatgaattttacttttcactctagactcttatttatttgtgatttctattctctagtatcctttattctaaggaagtggttgatgaacatttaggtcatgatttctaatttcttctaaagggtgacatccattcttgacttcctttcttgggtgacaaggaaataaacaacataaccatatctaggtatcgtttgataatttgttcatgatttcattcataagtgcaaagaatatatttattgaacacctattattgccactggtctgggttctggggacaaagcagtgtccaaaatacgttattttaaaaagtgccctcggccgcctgcggtggctcatacctgtaatcccagcactttgggaggccgaggtgggtggatcacctgagatcaggagttcgagaccagcctggccaacatggtgaaaccctgtctctacagaatactaaaaattagccaggcatggtggcgggcacctgtaatcccagctacttgggagactgaggcaggagaattgcttgaacttgggaggcagaggtcacagtgagccgagattgtgcctgggcaacaagatggaaactctgtctcaaaaaaataaataaataaaaataaaagggccctcatagatttaacattctggggggtactagtcattgaggttagatacaatgagatttgtgctaaagagagaaatagagctaaagagagggataggaactgtttgggaggggcaattaccagtttttatagggtgaccaaggaagcattactgacaaggtaagatttaaggtgtgtctttactctgatgcccccagttgtgtattcaataggcagttagtattggggcatagaaaatcctaaaacctaaatctgatgtacttttgcctattcatgaaataacttgaagactgttatacatagtgggagctaaagctgctctgccctccaagtgctggctgcttatgatctgaaagacttctgtgaggtcaccgtaggcatcatggtggcactgaggcatctatccctcctgcagaagttgcatctttgctgttaatactgtgtctctggtggctctagtgatgcaatcattctcgatggggccactgactctgatgtcacaatgacttggctggaggtgtcctgaagtctcttgtttgtccagggcctttgctgcagcttatatgttcactagtaatctggcctgtgcctaccttttaatcccagctggaaaatctcagtaagaatgatgataaaataaaaaatggggatattgacctcctgtcactactgcatggactttgatggtttccaatcattactttctcctctgtgtcaatctgcctcttcgagaaattcatactcctggtgagtgtccgacctggccttttgtcttctctctgccactgcccagctgtgaccttagacatggttgtgaatctattatgggcctattctaactctcaatgctttgattttataacctggcaaagcagcacctgctggttatttttgtgaagcaacaacacttttctagaaggaagtgaagaaagcacctgcttttgacggttgttttttatgaggacgttggtttttgctcaattcacttaggtcagtccatgtatgggaagttccaaataaggtcattctctttgaactattaactataacttgtttataaaaaacactgggatcagccaggcacagtggcccacacctgcaatccagcgctttggaaggccgagttgggtggatcacttgatgtcaggagtttgagaccaacctggccaacatggtgaaaccccatctctactaaaaatacaaaaattaggcaggcgtggtggtgcccacctgtaatcccagctgctagggaggctgaggcatgagaattgcttgaatc

SEQ ID NO: 3106 - DNA, 3639 bp, Homo sapiens
atttcctgctcttgaatatctggttgaactacttaagcttaatttgttaaactccggtaagtacctagcccacatgatttgactcagagattctcttttgtccacagacagtcatctcaggagcagaaagaaaagagctcccaaatgctatatctattcaggggctctcaagaacaatggaatatcatcctgatttagaaaatttggatgaagatggatatactcaattacacttcgactctcaaagcaataccaggatagctgttgtttcagagaaaggatcgtgtgctgcatctcctccttggcgcctcattgctgtaattttgggaatcctatgcttggtaatactggtgatagctgtggtcctgggtaccatgggtgagtatttggtggaggagattaacaacagacaatttagtaagcaattattatgtgccaggcactcttttaagggcttgacatgcataatctactttaatttgtatataatctggttttatctgtattgggttggtgctgttaatgcccatttcacttataaagggtgtgagagactgagaggttattttacctttccagggttataagctagttagtggtgggaccatgattagaaatttgggtgatctgtctaaaaaactcatactcttaactacattgctctcctacctcccttacatagctggtttcaaagctgtggaattcaaaggataaattaatgaagaaaacaagcggagctgaagaagaaagtacaatatggtgctgtcttcctaatgaaataaattcactaaatggacattaagctatttttatgattcacattatttaaggaaattatttccgatctttaatataaacacctttgaatacaccagaaatttcctgaggcacttggtcttaagtcgatattttgtaatggattaatattttttttacattttatatcacatgcaatctgttgtcagtcaccttcagagagtcttcatgacattccttaattagtcaaatgtttattgagtgcgttctatgttataggtactgggcagtttctcaaggatctctcatttttaaataacagaagaaaggtgaaagatgttgctatttcaaatctgtcatgggtccaattgactctatgacatttgcctcttgctgcctccctcattctatttcttcttctccaccttcttttttcttttctttttttttttttactatacctcctttataaaagttatgtatttcttttcatctattctatcaatcgtctttatctctccacagcaatatatcatctatttatcattaatcaataatgtattcttttattccaataacatttgggttttgggattttaattttcaaacacagcagaatgacattttttctgtcactattattattgttggtatgtgaagctatttggagatccaattcaggaagcaacacattggagaatggctactttctatcaagaaataaagagaaccacagtcaacccacacaatcatctttagaagacagtgtgactcctaccaaagctgtcaaaaccacaggggttctttccagcccttgtcctcctaattggattatatatgagaagagctgttatctattcagcatgtcactaaattcctgggatggaagtaaaagacaatgctggcaactgggctctaatctcctaaagatagacagctcaaatgaattgggatttatagtaaaacaagtgtcttcccaacctgataattcattttggataggcctttctcggccccagactgaggtaccatggctctgggaggatggatcaacattctcttctaacttatttcagatcagaaccacagctacccaagaaaacccatctccaaattgtgtatggattcacgtgtcagtcatttatgaccaactgtgtagtgtgccctcatatagtatttgtgagaagaagttttcaatgtaagaggaagggtggagaaggagagagaaatatgtgaggtagtaaggaggacagaaaacagaacagaaaagagtaacagctgaggtcaagataaatgcagaaaatgtttagagagcttggccaactgtaatcttaaccaagaaattgaagggagaggctgtgatttctgtatttgtcgacctacaggtaggctagtattatttttctagttagtagatccctagacatggaatcagggcagccaagcttgagtttttattttttatttatttatttttttgagatagggtctcactttgttacccaggctggagtgcagtggcacaatctcgactcactgcagctatctctcgcctcagcccctcaagtagctgggactacaggtgcatgccaccatgccaggctaatttttggtgttttttgtagagactgggttttgccatgttgaccaagctggtctctaactcctgggcttaagtgatctgcccgccttggcctcccaaagtgctgggattacagatgtgagccaccacacctggccccaagcttgaattttcattctgccattgacttggcatttaccttgggtaagccataagcgaatcttaatttctggctctatcagagttgtttcatgctcaacaatgccattgaagtgcacggtgtgttgccacgatttgaccctcaacttctagcagtatatcagttatgaactgagggtgaaatatatttctgaatagctaaatgaagaaatgggaaaaaatcttcaccacagtcagagcaattttattattttcatcagtatgatcataattatgattatcatcttagtaaaaagcaggaactcctactttttctttatcaattaaatagctcagagagtacatctgccatatctctaatagaatctttttttttttttttttttttgagacagagtttcgctcttgttgcccaggctggagtgcaacggcacgatctcggctcaccgcaacctccgccccctgggttcaagcaattctcctgcctcagcctcccaagtagctgggattacagtcaggcaccaccacacccggctaattttgtatttttttagtagagacagggtttctccatgtcggtcagggtagtcccgaactcctgacctcaagtgatctgcctgcctcggcctcccaagtgctgggattacaggcgtgagccactgcacccagcctagaatcttgtataatatgtaattgtagggaaactgctctcataggaaagttttctgctttttaaatacaaaaatacataaaaatacataaaatctgatgatgaatataaaaaagtaaccaacctcattggaacaagtattaacattttggaatatgttttattagttttgtgatgtactgttttacaatttttaccatttttttcagtaattactgtaaaatggtattattggaatgaaactatatttcctcatgtgctgatttgtcttatttttttcatactttcccactggtgctatttttatttccaatggatatttctgtattactagggaggcatttacagtcctctaatgttgattaatatgtgaaaagaaattgtaccaattttactaaattatgcagtttaaaatggatgattttatgttatgtggatttcatttcaataaaaaaaaactcttatcaaaaaa

SEQ ID NO: 3107 - DNA, 1103 bp, Homo sapiens
cggccatcctgcttggccagctgaaggtttgagactcaggatggggtcatggctgagactatgagggctgctcgtgcatgaccctgcctgctggcctccatgggcccactatctgaatgtggttacccttctccccaggaccaggtgccacctcctctgggaagctttccctgcccgtccacagggtatgcctccttgttcctctcctgccatcggtttacgtgcctgtctccatcaacagaccaggagctcctgaggacagggactgagtctgcctgattcatctctgcattcctagcacttaccttggtgcttagtgaaagctcgaacctgcctgggttcccaccttgtctctgctacccccagctctgtgaactcagagtcatttttctctccccgagtggcaccgggctcagcagacactctggccatgaaggcatcttctgactcaagcaggtctagatgtctacccccaaggaatcccagaacagttgatctctctttttatttttttattttttgagatggagttttgctcttgttgcccaggctggagtgcaatggcgtgatctcggctcactgcaacctctgcctcccaggttcaagcaattctcctgcctcagcctcccgagtagctgggattataggcatgcaccaccacgcccagagccaactactaagcctgtagcagcctcccaaactgcccagtcttgttcagatgcacctccagaaacacaggggtccaaaatgccccttcccagacaccctgaggagtagaacagtgccagcaggctccagggatgagggactagctaccacattccctttcccaagcctcagtttccccacctgtaagatgagggatatgggctctgactttctgagtttggaaaataaagtgctccccaaactgggctgctttctctgcctcaatttttcttactggagagtcaaaggccctgaattactttcatctaagggatgcttaggcatgggcacacaggacactcacaccttgctggtggccacaccctcccgctgaccctgcaggacagtttggctctgtccgtctattcaagaggtaaatgctcatcccctttgac

SEQ ID NO: 3108 - DNA, 4088 bp, Homo sapiens
cctttgttaccatgattttaactgctgtatagtatttcaaatcaagttttcagaagccgactactttggcaacgtcctacaaactcgcaagtatttagcacagtctgatttcttctggctaagaaaagccgttccaaaaacagagtggtttacaaatccgacgactgtcaatgccttctacagtgcatccaccaaccagatccgatttccagcaggagagctccagaagcctttcttttggggaacagaatatcctcgatctctgagttatggtgctataggagtaattgtcggacatgaatttacacatggatttgataataatggtagaaaatatgataaaaatggaaacctggatccttggtggtctactgaatcagaagaaaagtttaaggaaaaaacaaaatgcatgattaaccagtatagcaactattattggaagaaagctggcttaaatgtcaaggggaagaggaccctgggagaaaatattgctgataatggaggcctgcgggaagcttttagggcttacaggaaatggataaatgacagaaggcagggacttgaggagcctcttctaccaggcatcacattcaccaacaaccagctcttcttcctgagttatgctcatggtcaatggtgcaattagtaactttgaagaattccagaaagcttttaactgtccacccaattccacgatgaacagaggcatggactcctgccgactctggtagctgggacgctggtttatggcatcctgagacagttgcacagtgccagcggaggctgcactgagccttcatcgcccattgctttaggcctggagactttcatttttagtgcattttcattatttgggtaggtgacctgcttggatctagacagcatctgttcaaagttgtagggcttataaagtggaatataagaatgaactaagtatgtttctttagaaaatcaaaccaacaaaaataaatccctaggctacttttgttaaaatgctatctgctaaattgttgctattgtccattttagggtgttggccacagttatgtggtacatagcatttcaatctatagctttgtgggaagcctaaattgatgtatcctttaaaagttcaatctattaaacttgtagcctctcaatgatgaagacatgtgcatgaatacctgggagggcttgctgctctgtggaatgcagtgcacgtttttatggacagtaattacacagcattcctcaactgtaaggtagttaaattagaaatatgtttgatctccattttacactttttgatgaagttcttgccttcagctttggagtctgttggaatgaaactgtgtctcacagcttgcatctgatgtagcagattgccctgttcaagtcagcatgaacaaagctcgcagaaaggctactaggtaacggatttgagtttattcagtagaaaaaaagggaatgaggacatatctttaggtcccagaagcagcaaaacctcctagttacataacagcagggaaactaggagatgaaatctccaaaattttgtccagtctgtatgaactgcagtgattgtctgtctgctagacacttttttttagcctaattcttgttcgtttcattaccttcatatgtgtgcattgtactggttttgaaatgagcagacattgagaaaacaattttctgattccccattaggaacatatgattttcatttccctttagtgcaaaggaacaaacatcacattgaggagggagaagtgtacccttctttttcagcttaatgttacctctctttaaaaaaaaaacatttttgaaaaatttcttgactgatgacattctagaatttattgattcaatttaaaattccctgcatagtccaaataaacataatttttactcttcaagtcatctaaagagttgtgagaaagagcagtactatgtgttttatccttagagcattatccttctaagtgaactcctttcttattactgagcgtgtgtgtgtgtgtgtgtgtgtgtgtgtgtgtaggataaaattgtaatggccttaaagttgttacctggcatttttggtttcttaaaataggcatccccctactccctttacattattcattagacatgaggtgctgggttaagtgggccaataggaaaatctcaaaagcaaaatgacaaattcagattaaccacaggaagccattgtgtgtccctgtgatttgtgattcttttaaaaaaaaaaaaaatatatatatatatatatatatatatatatatgtatatctacctaagtgtgtgccatgtccttttgtagccatgggaacgtttgaatggagaaaaatggaggggcaccatcatgaggaaacaattatactgcattagtcagaggagagcgattttccctttgacttcttcctctctgaatggataaacttgtgaagggcagctaccttgtcctcctcttaacctggcttaatgtgaccttagtttgtatttccaaaaacaagcagtattaggttggaattgtatgtgtcttttctctggaggaagcattctgacttggtttagacatataagatactctgttttattcctggacttgggtgtttaaaatcagctgaggtttatcatgcttatatgaatagtgtttcccttctagatttcctttataaactccaaataaacacattcctgcaggtcagagaaagtgtttgataaaagcatagaattatggctttggaaagacaaactaagtcacttgttggtttagcaaaactggttggtgattagttggggccctcacagtttctagatgagaagcttaccttatcctgattaactttacttgctgtaactgttataccgaaaattgtaggtaggatgtccattactcaaacaaagcagaacaaaacaacaaaccaaaagcagcaataccaaatcatcactactagctagaacaatgagaaggattgaatttccaaatacatgcttatgtttaactcaactcttccaattacattctcattgtcctttctcttggataccgattgctaagataaacagacactgattaagtggtagaaagagaaaggtaaaatgcaactggaagggaaagaaaaaagtagggagaagctggcctatggatgtggctttgaagagaagacaggattttggcattccttgctaagcacgttcaatggaggagagccatgaagttttacaaaaataattatggtaaattaaaaggatattagatattggatctcagactagggctgctataatacagttctctgattcgcacaccagatgttctgccagcgaactgttgtctgggcattggaaggagttaggttttttgtgtttgtgaaaatctcctggattagtaaaaaaattttctagatataaagtggttttatttgggctcatgaccattgcccaaagtgtactgagcttttcactaagtgctcagcattggcctcctgttctcatttattcattttatgagatggacttggacatcactaatgcaaacacaggattcataaattattctgaagtttatttagtgccttgcctcaatggagcttaaagcatagcacataaattttatcttatttagccctggagcatcactaagaagcagctaggaactatggcttgccagacagattatgcttgtgccagagaagtggagaagcctgaaatcccttgtcaagtattccacaggaaggaaaggtagtctttgggctttggtctactgacctgtggattaaactctatcccttagattatcccatttctaaatacatttattcaatcagtatttctataatcacttagcatttgataggcttcttccttgatacatttaacataacgcctcagttgcatattacattatggaagaatatacgattgcttcatataacaacattctcatcaccagtgacagtgtcctactggtttgaagaaagatattcttggattatgtgttttatatctaaatggttattctgagactggttgtattttcttctcctactcgtgaaacgatgtgaacaagcattttaaggacaataaaaagttagctggttgaa

SEQ ID NO: 3109 - DNA, 1567 bp, Homo sapiens
ctgagacagacagacacacagatccgaggccccaggccaggactcaaggagcgctgaccgagacttgcccggctctcgggccccaggcgggagggaggcgaggctgaggtattcagtgccgagtgtggccttggtgctaggattcaaagaggaaaggaagaaaactttccattctaaaagaaactccacgtgaggcgaagaagatgaaatatagtcagaaaaccataccagtaggtgttaagttgataaatgatgcatacgacatcctatagaagactgtcaccaccccacctcactgatcagccctctgcctacagccacacccacagaacattcagccatttctcctgtggttcccagcctgcagcacagcgtctgcacgtggaactctggaatgctgacctacagtctgagttcctgtgcccttgcctggggctgactctctacttgacctgtaacccacaactgggcaagagaaaattctgcagccacagctctgaggacatgagcaaaatggtttccagacggaatgtcaaggattcccatgaagtgtcagggagtcttcaggccacacttcaggttatctccttctctttcccttttctgcttcacacttgctctcatcctctttctcaccccacatctggtcagaggagataggaaggttcttgttacctggtacaagacaacttttggaatcccagatattcagattatttccccttttcctctttgcaaatgataatactcacagccaagaggcatcacccggatccgaggctgcttctccttaggacatgcagacagaaggagaaggcggggctggcagcctccagtccacagcctccctttcttcttccggcgatgattaactaggcctagacaatggagatctacggcatacgcccagggcctcctcttctcaagcatggctgatcagtcactttcccgtctatccttcatttattgaagccaactatgaacgactaaaggaaggatgagaaaagtcacccaaagtcaaaggggacagcgtgggagactgttctagacagaaggaaacacctttgcaaagaccctgaggaaggcaggggactctccaggagcagaagggctgtgtggcttcagagtccacaaaagagagcagatacaggacactggctagagcaggccctggagcccgctgctgtcctggaggccttggggaggcccagtgttcccagggtggaagaagtaggggacagcttgacgtagtggctgttgatcagctgatatggaagtatgtcattttattaacaattgagaaaggagtgctgtgcaattccattcaatgccagtgatgcttatggccgtttttatgagttctgtcattttcaaatgagcaagaggaagcctctaagggggtttaagcagggactgacgtaatcagatctgtgtttttccaaagggagagggagaaaaagaacatttcttatttttcaaaaaaggtaatgcaaaagcatcattccacaattctcttgtaatgaaaaaaataaatgcaaacttaagcaaatccatcattctgaaagaa

SEQ ID NO: 3110 - DNA, 2434 bp, Homo sapiens
ggtggtgaagatgcttcgccccccactccgcccggctggcacggggccaggcgctaggaccccacggcctcgccagaggggggcgtggcggggcgggccggcggtatttaaattgcagccggagcgcgggggctccggtggggcagctgagcggcctgctcctcctcgggccgtgaccccggggtctggcgcggggtgggacccgggggcgggtttgcgcaaaatgtgccgagactgcccgggagaggagctgcggccgcgctgagccagagccatgagaccccagatcctgctgctcctggccctgctgaccctaggcctggctgcacaacaccaagacaaagtgccctgtaagatggtaagatgctctgcccagacagggtgaggaccacccccacctccctgccctagggtgtgctagtgccccagccccagaagccagaagttagaagagtcaggagaggaaagggaatgtaccttgcatttaatgagcacctactagaatgtttaaacaccttatttacccacagtcctgccaggtaagcaccattattctcattttgcaaaggaggagactgaggcttggagagattgggccttgtccaaggtcattcagctgggaacagtgaggctgatattacactgtattcccccaagctgtccccacagagcagtaggcccagctaggggatctagaatatatatatatgtgtggggaatttggggtaggccagctgggaggggctcctctgtgctcatccctcttggagacaaatccccttccaagctgggctccttgacttgggactgcccgctggagtgcctctcacttcttagtgcccagatcaaatgctgccatctccaggaagcctccccagcccctcccaggctggcctagtctgatcacaccttcctctgggttcctgcggtccccaggcttccccctatctcaatactgagaagactgaacatgtggggtggttggtgaaagggtccaagcctgtctcacctgccagaccatgaacttccctagggcaaggaccaagtttgatttgcttctattcctttttcctgtcccaagccagggaaactagccctaaagttcttgtgactctatgagatacagggcaaagagaacacctagatccacttgtaaggccgggcagtcactgaggccagagcctggctggggaaagggcagggcctccggaagcccctcttggacctgagactcgaagaagcttatgacacagaaccggcagctgcttcaggaggcaggaagtgcaggcagctgcctgcccgcagcccttccctgggggtgcaatgtctcctgttgccaccacctttcttgctcttcagagcccttctaagattcccggagcccagaattgcgggcagagaaggcctcagatgtcaccaaatacaaacgcacattctacctcagggagacgaggctcagaggggaaagtccttgactacccaacaggcagaggggaagcgggtgaattttggagtctggggaaatgagataagagataggaaagcactttctgaaccagcatgggaataatacacacgggaagtaaggagaagatgtgtgacccaccagggacctacaggattcgaacccagctgcctttgccactgttcactgcctggtgcctctccctactctgctttcctcccatgatcaggtggtgaaatggagttggatggcaagtctttgcttctgaaaaggaagctgggcagtgggtgtcctgatagcccaggacagtgggtgggagctctaaactctggtcaagggccaattcctccaattccctccgacggtaagtcaggcaatgctgggagctcagagctgaaggaggcatgaagaccctggaagtggagctctgagcaccgccctggacttcaagcttcttcctggactggactggagatctgggcatcccagtgcagccctgcccaccatcaggcccccaggcttctagagcaggggtcttgggcccctgaatggaaagccagtcttgggctgtgggcttggcaaactttgtgtcctggatcaagtctcaggggctggtgccccagggagcctttgcctatccagaggcagtatgcctctgcacttgcccgggggtaacacgcggggcacagcacggtgccccccacactgtaacagtcagtaagtgggtccatgatgctctttgctgtgctgaccagctgagggcccagtggtcagaacttggctggcaccaataggaaaaggaatttgcaaatgggagttttgagcccctgactgtctgatcttgggcagcccactccccttagcctcagtttcgttaggggtacaataggaacagggtgaacaatgcctgggaagatttaatggggtagggggtctctgcactcagcacgcagcctgacacagctgggg

SEQ ID NO: 3111 - DNA, 15890 bp, Homo sapiens
agagtgaaggagcaaaggggactcggccgccatgttaggagtactggggcggagccgggcagaggttttaggggtgcgcaggagtcaagtggtggttcagtggggacggaatgattaacaaaggcgtccgaagaaatcgttgttggaaggtgaccaaggtggaaagagacgttgctttggccctgcaagtaagaagagagagggaatagcctgaaggagtaacactaaatttaaaatgacacttttttaccaaccagcgaaagcagatgttcaaaggggatattggccaggtgcggtcgctcacgcctttaatcccagcactttgggggcagacgcggggagatagcgtgattctaggagttcaaccccagcctgggcaacatgcggagaccccgtaccgtctctacaaaaacattaaacaaaaaaattagctgggcatggtggtgtacccctgtagttgcagctacactagaggctgaggtgggaggatcgcttgagcccgggatgttgaggctgcagtgagcctcgatcctaccactgtgctccagcctgggcgacagcaagcccgtgtctcagaaaaggcgggaggggtgggatattattgatgataggccttctgacgtctggcaatagattccagagtaacatcggtcatggataaattttttttttaactaagtgactgaaaccaaagttaattgtcttttgagtgattttgcacagtatctcaaaatgaactgtactttttttcttgtgtcactgaaacagtgctgtgtgttctttttcagagtctgtcacactaagatgagaaatgtcctttcttcctgaaggtgtctgatgtgtaaaaatatgatatactttgtgctgtttcctcccttcccttttgcatattattctgaaacaacattaactagttactttgcgtcattgaaggtttggataattaagggagcactagaaaacttttttttttttttttgagatggagtctgttgcccaggctggagtacagtggtacggtctcgactcactgcaatctccgctcctgggttcaagtgatttctcttgcctcagtctcctgactagctgggatttacaggcgcatgccaccatgcccagctaatttttgtatttttattagagacgggtttcatcatgttggtcaggctggtctcaaactcctgacctcgtgatccacccgcctcggcctcccaaagtgctgggattacaggtgtgagccaccgtgcccagccgaaaatgtttctttgcaaggataaatatatgaagataaacttgccgagcgtaaatatgttcatgaatatagccacttaaggaaattcaaacatgcagagatgttcagctgtatgcagttatgtattcatgaagtattcatgtattcatgaagccttatttgatgtagaatctgagggtgctgcctatacataaacttgcttaaaggttaaaacttaaggaatgttcatcaaagtcactttcttacacctaactcctgatttcatgaatataacacataggtgcttatcaaactgaataccttggagatgagctgctccagcaccagaagataaaattcagtaactgtaatccttgaggtacctaagtgatacattttttttaagactgagccaaaataaaacagctttcctccttccctaccctctccgaccaaacttttagccattttatttatttatttatttgagatggggtctagccatgtggagtgcagtggctattcacaagcatgatcatagcaaatgacagccacagactcctgggttcgagcaatcctgcctcagccactcaagtaactaggactacaggcgtatactggggcttctagccatttatatggtattaagtgacagcttctatagttacttggtacttgtccctgtaaaactgcacagtgtgtattctcttggctcaattattagcatattctgccatttccttgtgaatgttttgtattttatataggaaaacttaagtttttaaatatcctgaaataactgaagaattttgtttttgcctttaagtggtaatgtataaagtatactattgcagagatacttacagagtgctttcattgcaattaaaatactgcagctaactagcatgttccatatgtgtaatctaaatgacatactggtcatgtgctatttctatggaatactaacagtagtatggtacagcagtctcaacagtttaaagtgttattttggtgataaactgtttacatttatttgttttttactctgcatatctttaatgttgggcattatgcctctttcttgagtttcagtcctatgactgttccattttcagtattcatgtttatgtgtctttctaaaattgttttgcttccttgctgctcttgagacaatttatgggcaaattttgttacttttcaactggccgtgtatttccctgtgaagagttgctggattgtctcattttccagataaactgaattaatgtagtagtgaggagaagccagatttcagaggttagtgaacaaatgggaatgagaaaagaagtaggtacttaaacttttaagaagtttggctctgaaaaaggcaagaaataatgggttagagagggcaggattgtaaggatttaagataggagaagaggcataagcatatttaaatttccctacttaagggccaaaatcatactgtacctcagtctgaactttttaaaggaattcaaggacacaaaattctgccctgccctgaaatccagtcaggaggaagggagaagagctctgaagtacttttgtaattttcttctacataataattgatttttgtttgattatttttctttcctatagctcctgtttgccaggtttttcatagctgcctatttaaccaaacttgtactcccaagaatagtgcatatttatgattcttaattccaaaaacacatggcaatgataatgtctctgcttcttttgagaaattaacttggttctgaaagatggtgtttgcttttcacacctgtatcattaatacttccttgccaaacctaactaggatcctcaccaccactgttagagaaaactgatgctcagttgaaccagaatgttaaatgtgaacaggatttgtctgtgttgttgcccagctatgtttatccatacacattacctggaggaagagaaatctgagataattgagttgattagattacttacatgaagatggtttaattgtatcaatacagaaaaatgcacaaggaaagaaactgacaccttaaggcaacaaagccctccataaaaagtaaccgaattttgagagttacgaactaatgtccattacctgaagtccttctcattccattacccagtaacataaatcaaattcagtaaataagctgctttatgtcttgagaaatttaactggcagaataaatggaaagaagtcagtaaaaagggagcagttgaacaagcatggtgtctcacaccaataaccccagcactttgggaggccgaggcaggtgaatcacttgaggtcagaagttcaagaccaacctggccaacatggtgaaaacccatctctactaaaaatgcaaaaattagctgggcttggtggcaggtgcttgtaatcccagctactcaggaggctgaggcaggagagtcacttaaaacccaggaggcagaggcagtgagctgagatcgtgccactgtaccccatcctgggcaacaggacgaggctccatctcagggaaaaaaaaaaagaaaaagctgagcatggcggcatgtgcctgtagtcttagctactcaggaggctgaggcaggaggatcacttgagcccaggagtcgtaggttgcagtggtgccattgtgttccagcctgggtaagagtaaggccctgtttcagtaaaaagaagggagtaaccaagacaggtagggattcagtataataaaagtcaaaagtagttgtttattactagagcctggcactgtaacctggtatgtccaaatgtgatttaatttgctctcaagatgtgcaccagaagaaataacccgaggcatttcaaagaaaaaacaaaatgtgacctgctagttctgttactctgccacaagttaacacattttgaacttaagtgcagagtcccatacatccagtgtgactccccaaatctcaaaaatttaggctaaaacctaattttgtgtccaagccagtgcctgcttgttcctgctgaatttaaaactttgggtccagcaatcttctatcgctggagggagggagaggtatgaaaataatgtttaatggtaattgtttattgtcatgggcccatattatacccagatttagagagctatttgacacacctgtaacctaatgtttattttaacttaatatctgctcagtcaggtaagagatgcaacttcacagaggtccatttaacgtgcctaaacctaagtagaaacacaaaagctatgtatagtcccttgtttgagataacactaaatttttagagaatagcttggtactgtggtagacagagttcacttaaaatgcatttaacaatttacagataactggaaagtaattcattcatcttagaaccctggtagggacattctattaaaatatttgtgtactagttaaagtcaaaatagaaatacagcctatcacacggtatttatactatgcattatgattaataaagccacctaaggtcgttactccatgatcatgggaagttgttagtcattaagagttcgggtttagcaacaaaaatcttgcgtttgaatctaaacacattacatgattttaagcatgttcatcattctgagattaaataaaaattaaggaaatatatgaaaaatgcttaataagtacccaaaaggtaatatggtgtagcaacttagaatgtagacttcagagccagtcagctaggattaaaatgacacttcggccaatcactgttgactataagcaagttatttaactctgcctcagttttgtctgtgaagtagggataaaatcttcctcgctaggttgctataagaattaaatggatatattaagtactatcatgtgagatcactttatttgaggctaaaaaaattttttttaactaggattcactgaaaatacatctataaaaaagccactctttatcatgagaagtatgattttctgtaccttaggtgttataaagcaatatcccctcagttttaactttaccaaaatacctgtcttagtaaatgatactatatataccaaatattgcatatgtgtatataaacttcaactgtctacttctatcactgacagtttaaaaattgagataaagtaagtattatctgagtaatataaccattttctatttatttatttatttagaaacagtctcactctgtcacccaggctggagtgcaatggctcggtctcagctcactgcaacctccgcctcctggattcaggcagttcccccaccccaccctcccgagtagcagagacggggtttcactgtgttggccaggctggtctcgaactcctgaccttgtggtctgcccgcctcggccccccaaagtgctgggattacaggcgtgagccaccgcacccagccaatctaaccattttcaagatttgatctgcaaatacctgaagtaagtacaagcactgtggcccagttaaagagtgttagaactgtaagaagtccaaaggcatagctaagaattgctttagagtcagttgtgggttctgaattcttgctctgatagttagcaactatgtctactttggcaaatttaggttttgaagccttccatatctttaaaaggaggtaacatttaacagagcaccaaatacaaggttttctgtaatattagttccatagcatggtctgcaaacttccaacatcagaatctcctgggatatatgctaaatgcagattctggtttcccaaccagaatatactgcttaaaaatctgagggttagttctaggaatctgcatttttttctatacaatgtatgtattagggttccctggagggacagaactaataggagatacatatatatacacacatatatttattaagtttattgagaacttacacgatcacaaggtcccacagtaggctggctgcaagcttgaggaaaagagagagccagagtctgagtctgaaaactgaagaacttgggggtccagtgtctgagggcaggaagcatccagcgtgggagaaggatggaagctgggaggctaggccagtctctcctcttcacgtttttctgcgtgcttatattctacctatgctggtagctgattagactgtgcccaccagattgagagtgggtgggccttccccagcccactaactcaaatgttaatctcatttggcaacacccttacagacaaacccaggatcagtattttgcatccttcaatcaagttgacacttagtattaaccatcacaatgtatgatttttaaaatctgcatttttaataagctactagtttatttttccacctaatccaattcctaattttatttgaaagcaccaaggtaaatagttcctaaatcactgttatttaaattgtgctccagtaccccttattcttgctgcaattccaagacagagataacaaaaatttttttttcaatgttttgtttttttgagacagagtctcgctgtgtcccccaggctggagtgcagtggctcgatctcggctcactgcaagctccgcctcccgggttcacgccgttctcctgcctcagcctcctgagtagctgggattacaggcatgtgccaccacaccctgctaattttttgtatttttttttttagtagagacggggtgcatgctgcatgctccgcctcccgggctctcgccattctcctgcctcagcctccggagtagctgggactacaggcgcctgccaccacgcccggctaattttttgtatttttactggagacgggttttcactgtgttagacgggatagtattgatctcctgacctcgtgagccaccgcgcccggcctgccaaaatttttaatgtttgcatgtacatagttactcaacaaagaggccaggtgtggtggctcacgcctataatgccaacactttgggagggttgcctgagcccaggagttcgagaccagcctgggcaacattgtaagagcctgtctcttaaaaatatatattttggggagccaggtgtggcacctcacgcctgtaatcccaacactgggaggctgaggtgagtggattgcttgagctcaggagttcgagatcagcctgggcaacatggcgaaaccctgtctctaccaaaaaaaaaaaaaaaaaaaaaagtagaggcatcgtggtgtgtgcctgtggtcctggctactgggaagtctgaagtgggaggatcgcttgagcctaggaggtggaggttggagtacgccaagatcacaccactgcattccagccttggtgtcagagttagaccctgtctcaaaaaatatattttaaaatgatattaagtaaagaatatagtccagccacatgagcaagtattgcttatctagaaagacgtataataaagttcttttggggagataaactatgatccattctatgtttcatgtaaatcaggggcagccaatcttctggcttccttgggccacattggaagaattatcttgggccacacataaaatacactaacactaatgatagctgatgagtttttaaaaagaatcacaaaagcaatgttttagcaaagtttatgaatttgtgttgggctgcattcaaagctgtcctgggccgcaaggtggaaaaaacttgatctaaagtatttgatttttttagaaaagtttttgaatggccaggtgtggtggctcacacctgtaatcccagcactttgggaggccgaggcaggcggatcacgagatcaggagatcgagaccatcctggccaacatgctgaaactccatctctactaaaatacaaaaacttagccaggcatgctggcatgcgcttgtagtcccagctactcgggaggctgaggcaggggaatcacttgaacccaggaggcggaggttgcagtacagtgagccaagatcgcgccactgtactccagcctggtgacagagcaagactgtctcaaaaaaaaaaaaaaggaagcttttgaataagaagcaactctacagtactctattgtagacaaccaaagtattaatatttggggggcacaatttcaaccaactttaaattatttcattctggaagtatgtgttgagtaaatatgaagtataaggcccctagaggtacagatggctatggccgtctaaaccattttactcttaacttttagtgtcatggacctctttgtcaatctagtgaagtctatggaccgcttttttttaaaaaagcctttaaacatataaagtacagtacattgaattacaaaaggatccaagaatattgaaatagttaccaaaaaaatttgatatagaaatatatgtggtttattaatgaataagatctagcagtggccttactataatttcaacacagtagcgtggtgagcataaatatttcaacttatctgcaacaatgtgatatggaaataatcagtttaattgtgacagtcacatttactgctaactactgtgattgactggctatgtttacattttattagaagttattgaaagtagagatgtaacctttaattaatctataaactcctaattaagaaccctggttaaaattttttaataggactccccaaaagctgatgataatttaccttctaactctcccttgctgcaaaatgactggctcataaaccactaagctgccttggcagccacttgttattgttaccagtaggtaatatgctgttttcttctgcttggcacataagcagtaggcatgaaataattgcttaatggataagtaagttgttaaattataaaactctgatggattgcttagtcctttaacaatttacacccccctcccacttatccaattcttttgtgacagattttgcactagcaaagtgcactgtttcagacaatcaaggaaataaaacatttcttgatgaaatcctacctcgcctcaacaggaaactgaattggagtcctcaattctcagtacatcagaactagtgtgtgaaaggatcaggagaggaccatagtattggagaataaaacattatgtattgatggttgagctttatgtcatcgtgtagtaaatgctatgaccataaagccattactgttaacacttaagtttatcttctgaaagaagcctatgaaatatctccagaaagactaggggattttcttctgtttgtttgtttgtttgtttgagatggagtttgctctgttgctcaggctggagtacagtggtgcgatctcggctcactgcaacctctgcctcccaggttcaagtcattctcctgcctcagcctctggagtagccaggactacgcactgcgccaccacacccagctaattttgtatttttggtgcagacagggtttccccatgttggccaggctggtcttgaactcctggcctcaagtgatccgcccacctcggcccaaagtgctggccaccgcgcccagtcagacttgttttttagtgaaataaattgttttcctttaggaccttattctttatgataacagattccaagaatatgcagtcttgtcaatggctgtttcatcctcagtttctttaaaaataaaatacaattagaacatttttagatatgctatatctatccaatctattttcctgtcacccagtaaggttttctatcatcagcacaggtctatgaaaggacagtaaagggtctcctgttacataccctagcactaatgtttgtaatagaatgttaagataagttgtttcatgtaatcggactacattcagtctttctctaccctctgtcctctatttacccacctatgcatgtggcctactaattatattgactgtacatgaccagcaagttgtaagttcttttaaaagcaggagctcaaccatatttgtattcacatttccttctgcttaaaacagggctcttgtttcttcagtaaatattcattcggtatccactaggtgtcagataatatacaaggtaggttctagggattccaagataaataaacacagatatgccaatatgagtctgacagttttggcggggagaggtggaaaatagatctgcaagccaaaaaagctacagtagaataatataaatattgtaatggcaataaaataccagaactattaattttacatttagtaatcattcagtatcaattaaatgggtaaaatggatatgttggcatgaatgacatataactgaaaaaacactaagaactgtatagaaactgaattagacatatgagtaatattagtaggaaggggagagaatatttgattccaggtaggctaccaagcaggatgttttttcagcacagccttggaataaaatctgtaacctttgaaaacaatcacatttttgttcttatgcaatctttgtttttaaatgtatttattgttttggctctagtccctgaatgttaaaattttagtgtcagtgttaattctcacttatcttctccagaccttactccctaattttctcattttcatttgccccaataagtgccaaccttaccttgaatagaatagtggatttatcagcttacaaggactaaaaagtcgtcatttccaaaaacatctgtccaataagtctgcctcagtgactacatttctagcattacaatgtcattcttagtacactgatttgatctttacaaattacataaatgtataaaattgtcgcatgtaccctaaattatatacatctattatgtatgtatcaataaaaaaataattttctgtgctttttctcctgttaaaaagaattcttttctttttgagacagggcctggctctgtcacccaggctggagtgcagtggtgcaatcttggctcactgcagcccctgcctcccaggctgaagtgatcctcccacctcagcctcctgagtagttgggactacagatgggtaccaccatgcctggctaagtttttgtagagacagggttttgccatgttgtccaggctggtctcaaactcctgagctccagcagtcttcctggcttggcttcccaaagcgctgggattacaggtgtgagccaccacacccagctgattctttagaagaccagtattgcattgtgattgcctctgggcaggaaaactaaggggcatcagtagactatgcaattactttcttcctctttaaaaaagtattgttaatttttaaatttacatattttggtatacaattctatgagttttgacaaatgcaaagaatcatataaccaccgccataattgagatactaaacaattctatcacctcaaaaaaaatcctcttgagctgtctcatttataatttttgtgattaaaaatggttatttttcaaaaagtaacgtttgggccagtgcgcctggagtgcaccagtagtcccagctactagggaggctgaggcaggagaattgcttgaacccgggaggtggcgattgcaatcagctgagatcacaccactgcactccaccctgtgagtgggctacagagtgacactctgtctaaaaacaaaaacaaaaaaacactttaaatgtttcatatagttattccttattcaaaaagtatgcctttttgggttaagacagtgccatttcaaatagccttgtagaaatataagcaaggaaatgctaaattataccattattgatcattagtaccttagcttgtagtttaaactgttgaagatgtgttagtttttttcccctaaggttttgtcctctagttttaactagagagagatattaataaccgaattctagcatgatctcttcagatttcatgtagtttgatgtcaatagcagatctgaattggcttcaagtggatagagctgtatgaccctcagtcttctcatgtatagaatctatgaaacctgtgataccagtgttttttctattcatacttcctttgagtctgcagctgctgttcttctttttgttgtttatttttattagccactattcattcagtaccttttatatgtcaaaacgtttgatatttaacctacgttatttaagggcttttgtactgctgctgtactttataggtgcatagatatggtaaaatcacaccatgcctcctgctctgactctggataacatattcctacagcaggatctcatttcaataaaaattaaaagaaacactagagagaggaagaaggggagaagataaatgtggctttaaattgataagtgaaaggaactaacatttgaggatctactatgtgttagacactttataacatggatcttctttagatcattgagataagcaggtatcacaaagggagtctgcttgtattgatagcaagaagaaaaacatgccataaatcactggaattattcagaatttttgttttgcatgttatcctccattatgaggacaaagacagcataatgtctctatgtagtaagtgtttggtgaatgtttattgaataagtagggatttttatcatgcatatagtagtgtttcttaatgttttggatccatggacttataaaaattttataaaagctatggctacatccaggatgttacctccctcccctgccacacacaaaaggaaacagccaagtccctcccctcactctaaccattcccacatctatatttgtgtaaaacccatgattttaaactgtttgcagcccctctgtaatccattcacatgacccaagaactcagccctggaaacatctctgggtatccaggtagactaaaagcatagttccattaatttatagtgctatatggttctgccatgctttattggtcctttatagacttgagaaaatcacaccatgcctcttgaccattaacaaatggtcatgttcagtcttcctttttatgagtggaaattccatccaatttgcttttaggttcattaatatgtactacaaccaaaagatcagcagcattatatactttatcttttttagtcttttgaagtacaaattatgcgattttacagataaattatctcatgggtagcatatgtctggctttctaggtggaatgattcctatttctttttgtacctctccccattcagaactcactttgaggccaagcgtggttgctcaggcctgtaatcccagcactttgggaggccgaggcaggtggatcacctgaggtcaggagttggagaccagcctggccaacacgacaaaccccgtctctactaaaaatacaaaaattagcctggcatggtggcacacacctgtaattccagctgctcgggaggctgaagcatgagaatcacttgaacctgggaggcagaggttgcagtgagccaaggttgcagtggatcaagatcacaccactgcactccagcctgggcaatagagtgagactctgtctcaagaagaagaaaaagaaaaaaaactcactttaaactctgctagaccattgcccttgtatgtgaaattttatctggatagaagaagatgaggaaaaaaattttcttgtcttttagtggaggagaatgacatgtaaaacaagtattctttaaaaattccaaatatgatatgagaactaccccataaagttgtgaaggtcacattggtgaaaggaaaactaagtgctgtgtaaattacaaagttgtctaagtatccacctggtccttaccttgctatagaatcttttttttttttagacggagtctagctctgtcgcccaggctggagtgcagtggcgcaagctccgcttactgcaagctccgcctcctgggttcatgccattctcctgcctcaaccgcccgagtagctgggattacaggtgcccaccaccacgcccagctaattttttttttttttttgtatttttagtagagacggggttttcccatgttagccaggatggtcttgatctcctgacctcgtgatctgcccacctcggcctcccaaggtgctgggattacaggtgtgagccaccacgcccagcctaccttgctatagaatctttaggcctaatatagtctagccagaacagctatttggatgcttgcctaatcttcaatactggtttcccttttatacatgactgcaaaactgactctcacctaggtttgtgatgttagaaactccagttgtttactattattattaaagtgggaaacggagttcgttgatcaaatggattaatgttttgagtacttactatacaccaggggctcttaaatttttacataaactttctggatggagagtgatagaatctccattgttcacttgccacaagccacaccatttgtagctaacatttgaatgcttactatgagcaaaggcactgttccaagggcattacatgcacatcattcatatttctcatttaatctttataacaactccttaaaatactggtagtattcttgttccctaatttgtcaataagaaaactgaaatttagagattatacaatttgcccagcactattggaaagctgggactttgaaacctggctgatttgactccaaagtctgcactctattccaacagactgccagtgcctccagaattaattagcattaatattttctgttgtttatgatctaagtatggctgtccatggcagggagttaatgagggaggcattaatggggaaacactggaccacttctgagagatgtggtgccctccctcacaaacaggtttcttgtggtgaaatcaggttggaaggataagagaggctgaagaaggtggaggtggtgtagttgggcctgtttaggaactgattacatctgagcctctggccctttttcctgccagctgactcagagctggcagatgggccaaagtccaggcaggttgatttcatgggctgtatacttcaaaggatctgattcctggtgctactaagcacattgcttttccgaaggcacagtcttgtgggggagggaacaggatggtctccatgaggtgtttgtgaaagccctaggcaatgtttgctctaatccaaatatatacagcttgttttgagtttggcaataaaacacagagccagccctaagcagggctgaaaactgagtatttaaaccttaagtattctgcaatacaacaacagttaagtatatgggtcctagagtcagatagaactgaaatctaatcttgacttcaccactcagctgtagataaattactagacctcagttttcttgttcgtgaaatggggattttagttatagagtacctacttcatatggttgtcgtgaggattaaacaaaaatgtataccacagtacctgagatgtagtaaacactcttgaaacattagtcattattcattttttaaatttttccttcaaatactttcctatccaatagtcattattcattgaaaacttctattttataagacgatctcagcacttaaacaaaataaattgattcatcatgttttcacttaacaggcattcaaaaggcatttattattgtgttgggtagatggatggagaaaatagcaataatttttgttgaacacctaaaatgagccaaactttttaaaaaatattgtctcattttatgctcacaacagctctatgaagtattttcctatattatagatgagatcatgggccaagagaggattagcaacatgcctaagatcatatagtcagcactgtctaattctgaagcctatgaataaggtagcatttatccccacggaagcatggtattcagcaggcaggcagacacataaacaagtacagctggcccatctagcctcacgttctgcatccatggattcaac

SEQ ID NO: 3112 - DNA, 2005 bp, Homo sapiens
cacagcaacatctaaactggtatttgaccaaacatctgggcatcatagcctagccaagttgaaacaaaaaattccatcgcaaagatgctgatgctgtatgagaggttaggagatttaaactccactctaatggaaatgacccatggagataggtgctgaagtttttggtctcaatagctgtctctaggctaaaatgtcttagctctacgttgccgttctttgagatactagtgtcttgtgtttatagattaaatagcttggctgtataagtactgaccaaaaacgtattagcttttccatagactctgaatataaaatacatttagcgactgcttcagtgttcacatagaagtaaagttatttttaaattaacctttgtatgtttttccagccttaatgtctttatatgagttcaagatgatgaacagtcttggtataacgtgaaatcatttgtgaatttggataagagcagtatatgcctattcaaaaatattattctaggtatctattatataacatggttacagtataaagctttttgttgttactctatacagctaaaactcatgaaatactcaattacagttgttagttaaatcaacaaaagcactctagaaacactgccaattagcttgctcagataagttttaatttgcatgtaaaggatgttagttaaatgtcaattgcttcctcaagatgaattattgctatttctctgtagttaactcgaaaacatgttgcaagaattttgagagaattttgtttagacagtaagtcaactgcatctattcaacctcttttttttagatttagcaaagtgagccaataattgtgtcttttattaaattttaatcaaatatttaattgcaattttatgttattgtgaaaacatatggcatatgatctagtattcagattagtattaataactacatttttgttgctgattttcaaatatttgttacatgtagaaaaaaatgggatttctgtctgcctaatgacattttttgagttagtaaacattttattagaaacaaatactgaaaatttccatagtacaaggagggtaaaatgttcattgtcttcttgaaaggtctagacagaaatcctaagactacagattaatatcatacaattgaagatgtttaaaactatgtgatctctagcattgttctgtgttttgaatataattatcctgtgtacattgatcttgcaagctgaaatagtaataatattagaaaagccaatcaataattatattaaaatctgagatttgctaagatgaagatgtaaagttctctggtctgttataattgtaaatcactctttatacatttttattatacttatacccacctctgttacagaaaccacattttttttcccttcaaccccttggcttgtggttaattggtgcttgattgtttatttatttatttattttgagatggagtctcgctctgttgcccaggctggagtgcagtggcgcgatctcggctaactgcaagctccgccttacgggttcatgccattctcctgcctcagcctcccgagtagctgggactacaggggcccgccaccatgtctggctaattttttgtatttttagtagaaatggggtttcaccgtgttacctaggatgatctcaatctcctgacctcgtgatccgcccaccttggcctcccaaagtgctaggattacaggcgtgagccactgcacccggcctggtgcttgatctttatagctgaaaagaatagtgaaatatttttctcttccacaaaaatacttctgaatattgctttcaaaaacaaactttcacaaaactagtttttgcctcctaccgttgttaattgattcaacaagtacttattgaacacaaatgaggtcaaaatctattatggcatctattaaaaactgttattggctaatatccacaggacaaaaagataaaaaataaagtgttttaaaaaattctgccctatctattgcattttctgacctggat

SEQ ID NO: 3113 - DNA, 8731 bp, Homo sapiens
ctctgcgcctggcccggcgactgcgggcgctgcggtccactgggtccgcctcttcccggcatgggtttctgcccagctcacccgctgtcagctggggtcctgctctggtgggaggaagaggctcagacgcttccctgccctctcgcctcaaccacctcgaggcagcggctcccaggatgtgcactttgacgactaaagctgagccggcgccgccacgaccttgggcgggtggtcggcctctgccctgagcaggaagtagaaagtctcagcagacccttcctgagggccgagcaacagtgtagtggcgtattccacatagcaaacagatgtacactagattttgatggcatttttccagggaccctgggagcatctgtgttctcgtgttcttcttgcctgtgaggcctcttctctctgaggacagatggtaggacagagagaagacagcaaatggaaaacaaaggctgctatttttttgtggggcagcatttcttcctgtgacaatatggtgtaagacaaaattgtggcctgccatgaagttgtgagagaaaagcatccctcatttcttcaggaaaggccactgccgttccctccggctcctcttctcaggagtttgtgcattcatgaggtgaattccttggaagatgagggccaagtcttattcttctcagtctcttctgcatctagcagaagaataatggttgcacagaaaatcttggttcagtggttgagtgaatgaatggatgaacaggctcttgcacacaaagaagagacatgatgtatttgcatccttccctgcttcagccaggtccccagacagtcccggtgtgcacacttccctgcttctgttcatgatgttctctgaacctgggatcacctttccccttcctcttacctgcccgatcctacttgtcctcccagattcagttttctgaagctcagagggacaccttgtattgctggatgataaaaacaggagcaaagtgatgaagtgctgacaaggcaacaatagaacatgagagattcactgctgtgtaggaagagatcttcggtgaccatgtagcctgaagctctcattttgtcatcgagggacaccaaaactcagaacagtgctaagctcctacatcctgttctggaaggacaatcctgagcacacgatgagccatataaacttcagactgacgctgagtgaaagaatgctggaaaagcatcacaggccagggcagcaaagtcttcaaggtcatccgtgctctgatgatgtcacgcttcttccctgtctggaagacatttccccaagagcataccaccaacatcagggaaatggaatccaactggtcgctgcaaagtttgctgagcacacagtgataaagatggcaagaaggtcctgagagaaacgcaatatttttgtgcagaatgggatgttctgcctttgtcccatgctttgaaatttaccacatgaaaaataaaattaaatactgatcatcatatacgtttctgttatattaggattagagacaagttctgtttagaaataactccaagaacagtttttatattttgttttcacattgaaaaatcagtcagatttgctttagcttcaaggaacgtgtttatgtaaaattaaatgagcgctggcagtgagctagctgcagattttttttttctaaatgggatataggacagaaagatgcgttcgcggccatgaccaggctctgggtactttacaaatgcccagtggctgggcatggaaggaatacattgctgggggaagttaaaacctagggctttctcgcctgttgtcttcctgttcccgtaagtccagcaatggctcaaaccaatagtgtagccaaaaaacaaaaggccctgataaggaaagccaggggttgggggacacctcagaaaaacagagcaggggaggtcagaagaccttggaggcagaaattctgtaggatactgacaagaggccaaactggcagccaagagaggtagctgaggctctgagagacaaggcagatggagcccctgagcctgggggtccctggctcttctctattaaatattcctccaagaaagcaactgataaagggaggtcaggagtggccacagaaaagacaaaggctgggcctaagactgaagttcctacaggcaacatggtgacttctgccaacccactggaatgtctggaagaaataaaggccctagtcaggaatcaggcatctgattggagatatgatctgatatgcagaagccagaagatactgtccctggcaggggagagtggtgaccgcccaatagacgtcccacacacttcttttggccaactggtaagggagaatgctgtggttaacaggaggatctcaccaaccctgggagagggtctgggaagcatgaacagaacaggtggaggtgagtgggtcccaccaaagatgggcagcaaaggccctggggctacctcagtgggatctgccattaaacatctgtgggactctttctgtatatcttgaaggtggaagctaagtctctgaacacccactgcggacagcagtgagaaccaccacctggggtgagctaccttcatctctagtggtggcataaagtctgaggaagattggagacccagaaagaaggaaagagaaattggagaagaattcctccttctggtcctaaaactctgaactgggagagagacaggctatgggagaagattgagatggattagagaattcctcttaaggacctcttccctagccccaaccccaaacatggaaagaaaggaagatcctgagttccttcaagggaaattctaggcacctagctagttctgagaagtaaataagcaacttgaaaagcaagaaggtaacagtagcttaaaacaatagccagggaagctagaatcacagaatgtttcgttcccctacaaaaactaaagataacatcttaccatgtctctgagttgcttctcagaaactgggaccccccaccacatggatcttcttgcatgtagacctcagataagggggaattggggactgaactcagcactgttctttgttctaaatttctttctgagaggcctggaggaagtcataaccaaccagagtaacattcttttgcactgaccccaaatttttaaacaaaacttctcttctttaaccaattacagaaaatctttgaatctaactatgacctgtgagccccctgcttcaacatatcccacccttttcggccaaaatcaatatgcgggtgttcagagacttagctaaatcagtattgatttgtggttttgtctgtaacttctgctttcctgaaatttatgcctgcctttaaaaatctttacctacaagccatatggggaaggctgggacttaagcattagctgctcgatcctccttgcctggcaccctgcaaataaataccttcctttttcctgctatgaaccttggtgtgggtatctggtcttactgtgctgagccaatggaccccagtttggttctataacaagataatggttattttcacacttacacagtagagagcctcactgccttaggagcagatactcctgaggcaaggcagatcccaaagatgctaggatgaactagctgagtttgtctaggatatgccacatacatggcacccagagaatcctaccttgtcctataagatgcataaagatgggctcaaataccaattcaaagacctgtggacaagaaaaatcacccctacaatatccacaaattctaaaaagacttgcttgttgtcagccttggcttttgagttcctgcttccactgaattagttcagtttctgactcagctcttcagtctgtagatgttgtctttgttttacatcaaagtgacccacatgtgggacttggcctatacacttgacttccactaaaaaagccactcgtactcaatgtgaatgcctgtaaagcagactgtcctgaaggggttaggaagctgtggagatagttacatcagaacagagcaaatgactttggaatctgaagcagacctccttgttcttagcagttttttggcctctcaaccacgtggcttgccatctttcttctttctccatcaccctcccaataaatcttttctgttcaagttccattgaattctaattcagaaaagtttaattatcttctaatgagcttgtcttcagctaagtcatgattcagggtctcaccttctaaccccagatgtttatcagggtcttttctttaacaaagacagtcctctctgagaagagggttataatttttttcactccattaagcctgaatgaaggttgactacagaagagaaaggatgctgcttttctttgctgacctgggagaagatagacttttttagcccctgtgaaatctgtgaaggtggttcaagaagcaaagattgaaggatgaggtcttcacccttcctctacctggagaagttttccttgtgctggtgagagaagacatgtgcttactttatcttctccaaagagcagggaatgactttgaacttgaggtgggtgctttttccagagcagatgttaatcaaagcagccaaccctagttctggaagtcatccttgacaaggcatttcttttagtaaaattcaaacaaaatttaaaccttcactaagaaaaggaaacggagtggttcagagttattgctatgactagtgtcttgctaagctaccctagaaaaagggaaatggaccacctgtcccctccattctttgcccactctaggaaatacacaaaagaatagaaaggacttaacagttgtttactggccagtctctgtactgaatactttggatatatgatcaatctaatcttccgagagaagaatcttcaaaatttctccaagacatttgtccccattatatgtgtgaaaggaaaataaaaactcaggatctcaattcactatgccaaaggaaaaaaaattaagctaaaagctgagtcatgcaagaagctgcctttctttttgtttctgagcagatagctgcagataagaggttaaatatctccacaggcagttagtctatgttcactttatcttatgaaaagtgccaatttactgagcacaagatgaatacataattgactattcctctacctgctccttttctcttgcaatatagggattaccatacccttcctctttcccctccagtccactttttccctttaaatattgatgtcctcaaaatcacctttggagaaaggcacagaccacagactatttctgtggctctgtctttatttattctgggcatgtccttaaccttgacaaaataaacttctaaattgattgagacctgtctcagatattttttggcttacaaattggcggctgacggaagggactctgagaggaggtgcccctgacctttgacaaatctcttaccagtacttggttccagcctaggttatctttgttgctcaaagataagacaattttctgaggtctgggagcaactccctctggagaatccctgatcaccccaaatttggttgagatctaaggtttattttgaagtacaactccttttctggagttttactcacttccaacaaaaaaggcgagttttcctgtttccatgacaatggatggcaggcaactcctttctggagtttcagcttgtatccaacagggaaggtgagtttgagtattttactgcttctaaaatggtagagaggagtattgagcctgggcgccactcctaggtaagtagctgaattggagttttgtcttgaaaatcctgcttaatgactaagagttaagattgacaaccagctgatcttaatttccttttaacactaaagtgctcagtaatcgcattggttttgttgttgttgttgttgttttgttgtttccttattattttagtctttctcacattggattcgaccaactctaccttatttggtcaaatccaaatgagaatttcaagttatggtgaacaatgtttttgaattggctaaaactcctcacagctgcaaaaaagaagaaagaatcatacgcttggtttcgttagcagcagcaaatctatatgagtatgcagcaacttgattcttgcctcctcagaggaaagaattcgtctgaggggcataaggcagaatgagagaccacggcaagttataaagcaagagtgaaagtttattaaaaagtattagagcaggaatgaaaggaagtaaagtacgcttggaagagggccaagaggacaacttgagagatccaaatgtaaacttgggtttttttatgttggcatgcttccgggctcttgtgtctcttctgccctgattcttcctttgggatgggacgtccacatgtgcagcggcctcccagaacttgggaggggccccagccacagtgtgtttgctgaatttttgcgcatgctcacttgaggcgttgttctcttaccagtagagtgttcctagaggaaggtcatatcccagctaaactgccattttgcctcttagcatgcgcatgcttgactccactcacccagctcctgagatcttattgacagcagctgatcaccagcttcaggtgttttctatctattgggagaccacctttccctgctgctggctttgaccaattgttttggacagacagtttaataactgcctgaccatcacttgacagtctcctggcagtcctggttgaggggtagggcactgccctgccttgcttatgtctgcctaactacctactcaaacaggttctctgttcacttcctttcttaaaagattgttcttttgtttacttttcttccattctattcctccttccccttttgccatctttggtaccaagcaaattcaaaacaaaacatagagaaggcttctaatcagaccctttaaagaactcagaataaaggtgccactcaccctttttcggggtgtcctgctttctttgtggagtttcaaaagtcacgggcagatttttctcaggtctaaagctctgctttcttgtattgcattacctgatgtctttgtctttggtgggggtaccagagattaccttgtactgtgagagaatttggccttggtgtgtgtagtggtggcagagaaccacaatcttagggatggctaaggacagtttataggaaatggtcattactacagggggctacttatttctttgtacatttaaattaagaaaattgtacaggctttcttggccctattccttaaagggatctaccataaagctagtaatctaatcaagctaaattgaaaataacacctatcaaactgagtcactttaataaaattctttgcaaaggaaatttacatctttacaggaaatctccacttagtaagagcttctgggtccctacaatggcttgaagttcacataaaagacattgcctttgtttagatctaagcgtgtgcctttgagatgtacattttctacactgtttcacctaagtcatgtctttgggatgcaaatttacagttgcctcattaacaattgttcaggacatggaacagataatcatgagattaacagtctaaaatagagaaaagttttgaaaacaggcaaatgagaacttttaaatctgtaagatctgcctctgtctgggtgtctattatgtctatatgttcctatgtctcatgtggaaataatatttcactatcaattatgtgaaagagctctaattaattggcttaaagaaaagtcagtgttcatcaacttaatagaagctagctcagaggcttttcagttcacatgactttagtaatctttggtaagattaatttggtaaattttgtctcaaaatcctctccaataatttaaaatcttaaaggcatgttaagttaaattaagtaatcctaggttttttactgggaattagagttactaaaagttagattagtaggatagtatgatgtgtttttggggaagtttataaaaacatgaggatgtggtttttgcttaagaaaatgtaaatttttttctagttcagaggacctttctactgatgttgagagaaaaaccatgttcgcatccaactgttttttggtaaactggttaagtttgtattggtatctcatggctagagttctgaagtaaaagctataggatctttatttgtatgagtgtgtgtgggcttaggtgtgtttatgtatacctacatgtgtattgttatgtttatggccacaaggtaccaaactggcttaaaaataaaggagaactcacaaattcagtaaataagcccagttgcttttcaagttaatgtgacttaagtagagttttaataaataaactggctttaaaattattggtaaaataaaattagaaatgtgttcagaatcgccaacatacattattgtttagatttattggtcaagcaattttatatttttttctcttaaatactataaggtgtcaagatttggcatgagggttgtaaagctataaatgtagcccaaaagagaattatatttgtgtaacttttcgataaataaagcatttaatattgttggtttaatgaaaatagctaaatcctgagttattgaccaaaaaaaacccaaaacatttatttaaccttaatattcttacttaagtaaacacctgaaattcacagcctataaaaattgttaacagggaaataactctaaatgatgaccatcacagttttcatatgtaatctagatcaactatttaaacaaattaaataggcaaatgtaatagaataaatgcttgtaaataaacttgtca

SEQ ID NO: 3114 - DNA, 440 bp, Homo sapiens
caacaatccattggctaacgaggtcgatgacgccagacgcaagacgccgggcctacagcgggagcgtgaggaaagccgtgcgttgcgttccaaggcatctgtgagcccgcggagtatacaccatgagcaaagctcaccctcccgagttgaaaaaatttatggacaagaagttatcattgaaattaaatggtggcagacatgtccaaggaatattgcggggatttgatccctttatgaaccttgtgatagatgaatgtgtggagatggcgactagtggacaacagaacaatattggaatggtaatacgaggaaatagtatcatcatgttagaagccttggaacgagtataaataatggctgttcagcagagaaacccatgtcctctctccatagggcctgttttactatgatgtaaaaattaggtcatgtacattttcata

SEQ ID NO: 3115 - DNA, 313 bp, Homo sapiens
ctcaattattctacaatagaacactggagagaaagagatgcaggtggggaggaaggaggcaggaataatgggaataggtggaagagaaggcggaagatgtatttatccggatacaatcaaagaaccatttcagaggaaaaaggagaatgtgaggctataatgacaaagcagccatctgcacaccaggaaggggcactcaccagacatcagagctgccggcaccttcaccttggacatcccagcctccagaactgtaaaaaataaatgtttgttgtttaagccacccagtctattttaatttgttatagcagcc

SEQ ID NO: 3116 - DNA, 1911 bp, Homo sapiens
aaaaccctgaaggatggttctcaaaaattctaaaggaaccacagggaattccttttaagagcaacagaaagcaagctagctgaggcttctggactttttgaattctgaaaccaaaagaagaataagtcgaagaaattttactttggtatgtagaagcgttccaatttgtttggtctaaaagttatccatggacttttcttcagagtgctctgtttcattcgatgtagttaaaggttgatttcaggtaatttctgagatgtgatgatttggaaaatgtagcacataaaaatgaggaacttacgcgttaatggctttactttcaaaatgcctatgtatctttctggcatgaatttgacttggctcatcacagctctgatatcctctgcacattgaggtgttgtcgttactacttaatatttggtctggaaaaaatgaatcctgttgctaaagattttgttggtgggtagtccacagcagaacgattgctacgggaggtgctggctgtgtaagtcatgagctttgataatttcagtgcttaatgtacagctgctggtcttggtaaagtaccacatgatggctcatagttgcattcctagttgaaactcagcacaactctggattctgattgttctacaaatgaatgagatacaatagtaaggaaatccacagaatagtaaaatagaatgttgtttgttggaattcatttctgtggctgtaggtagaagacgatatggcaaattcactcaccagaaaattgtactatgagttttttgtttttgtttttgttttacataagagaaaagaaggtaaaaaaaagagaagagtttgaatgtcaagttttgttggacgcagaaccaagttaccatttgctgttccggagcctctttgctgtccccataggaagaaagtgttcacaaaatgcttttaatcctaggagcattccgttgtctagcaaaaacatctttctcactggcctgaaatatacaaggcatatttttgtatggccatagaaatatacttttcaatgctctgatttgaaaatggcgacattgttaaaaaagagcagggacttgggtacagtggtgaatgcatgagacgttcattttgatgaagtgttgagtagactagatgcttggtatcaaatgccttgataaaatattttggaaatgagagctggtttccattaaaaaaaaaaataagcccctctggagggattgacttatgactttcaccattttgttttcatttacttcaagtagtttttaaaattaagtatacctatgagcacgagccaggcttggactatagattttcagaagtcgatgtgcttgaccctagatatttgatccctgttggtgattcttggtcatctggtgttgtgatcctcgttagcagaaccgcatctgcatagatagcactttgatgcacatcagagcccaaaacacttgaattttccaacaacgagaacatcgggtgtttctcttggtgtgtgctaatggtatggactgattttgcagaatcactgaagcaagctgtaaatgatgtatgaaatgaaaaactcctgtccagtgcacagagcgaatatatacagttctgtgtaatcactgtggtgctgggctatttgttttaatatttccttcagacatatagcagtttttttggtgagtcatatccagacacttgccattggcacatagctcaggtttctgttacatatattttaaataaatttcaatgttgtataagtgtacttgaattaatgcaataccagattttagaagacttgacctttataaaatagtatttttatgaaaacaatatcaacatttttgttctgaaaaatttggaaaatactgaagagcctaagtagcaaaattggaaatcattttatgccattatggagaaatagcc

SEQ ID NO: 3117 - DNA, 1747 bp, Homo sapiens
aggaaagaacagtatttcatttcaagctggactactcatctaccaaaaaaccattctgaccaaagaaacagatgcagaattacagtcacagctgcattctgcacagaacaagttggataatggtaacctctctgtgggtaacttctaacttccaacttacccaaatttccacctatgcccgtaatttacaagttatattatatttctaggtatactaggtttagattcactgggatcaaaattctggttgctaccagaaatactgctgttgagaattttaaaaagatagaaagcatttgacatgcaattttatagagagagtaactatgtttgtataattatattattctctaagactgacctcttttctatttagcttaacatatggtagtatcctgaataggattctctggttcatcagaacagaaaaagcagatgagttttattacacaatgttattgactaacatcagttacagtattaaagaaattattctaggaaaaaaaaaccctatcatttgattcctaataaaaaaccaggaatgacacctcagaaaatcacaaaattttatgatttgagcttctcttatagaacttttaaaacattagtttaaatacaattttgaataacaggactgaggggaagaatggggggtaaagaataaacttagtaaagcagttaagactcagggagccttcatgctatgccaaattcttccctaaggttgggcaaatcacataatctcactaagcttcataaagttgataataacacaggcctgtaaagtagtaagaaatttctgagtggaagataaaaatatcactgagtatttcagtgcttccatttactccacactataatagagatgataatattgccagctacaacttcacaggagtgtttagagtattactgagtatgcttgtgagattcttagaaatcctttgatgaaaggcaatggccaaattcacattccatgtgactccttaaatgtaaaccttttgttttccttgacctggacatttttcaagactgcaggccatttttatttttatttttgtagactatccctcaatttgggcctatctgatatttccccatgattaggttatgcatatttggcataaatatcacagaagtgatgttgcatccttctgagagcataacttgaggcacttgatcttgatgtattgtaatatcagtgatataaattttgaccattaagatattatcttccagttttctccaatgtagtaaataagaaatcttataaagagccactaatgatcattccttttatatttattagttagcattacattccaagaaaagcctttcagttctccttcctttattcatttatatcactacagtgtcacagatttttatgttagccaatggattttaagccattcctatcattatttattttgatgtttaactgtcccaaatttggcaatgggaccattcttccccttcaccctggctcctgtttaacctatgtacccataacgctttgagcacttcctacctttccagcatacacaaaaagttttctctgcaccagctttggaatcagctttttctccaatgagacctagctctttttagtggacaatggtatttagacaccaaaatctgggcactaaatgtgttcactgttacttacgtcatcgcttacagtctctctcagaggacagagctggaacacacatcacacacacacacaaaaacatttctatctacc

SEQ ID NO: 3118 - DNA, 18049 bp, Homo sapiens
taattctgtctctgctgctaacaaattgtgtggctttgggcagattactcaatcatatgtctccatgttgtcattgttaaagatgaaatattgaattagatgatcttgaaggtcccttctggttcttaagcttatgcagtcatgtgcatgtgcacatccaacccctccaaaataaagaaaataggcctgattattcaaatgatttgaactttaaagctatttacatataaaagattggtttacttgtgaattatttaaccctactctgttcgtatcatttaaaagttcttcaggagagaataccatgggtaccacctgaatgcattgaaaatcctaaaaatttaaatttggcaacagacaaatggagttttggtaccactttgtgggaaatctgcagtggaggagataaacctctaagtgctctggattctcaaagaaagctacaattttatgaagataggcatcagcttcctgcaccaaagtgggcagaattagcaaaccttataaataattgtatggattatgaaccagatttcaggccttctttcagagccatcatacgagatcttaacagtttgtttactccagattatgaactattaacagaaaatgacatgttaccaaatatgaggataggtgccctggggttttctggtgcctttgaagaccgggatcctacacagtttgaagagagacatttgaaatttctacagcaacttggcaagggtaattttgggagtgtggagatgtgccggtatgaccctctacaggacaacactggggaggtggtcgctgtaaaaaagcttcagcatagtactgaagagcacctaagagactttgaaagggaaattgaaatcctgaaatccctacagcatgacaacattgtaaagtacaagggagtgtgctacagtgctggtcggcgtaatctaaaattaattatggaatatttaccatatggaagtttacgagactatcttcaaaaacataaagaacggatagatcacataaaacttctgcagtacacatctcagatatgcaagggatctggcaacgagaaatatattggtggagaacgagaacagagttaaaattggagattttgggttaaccaaagtcttgccacaagacaaagaatactataaagtaaaagaacctggtgaaagtcccatattctggtatgctccagaatcactgacagagagcaagttttctgtggcctcagatgtttggagctttggagtggttctgtatgaacttttcacatacattgagaagagtaaaagtccaccagcggaatttatgcgtatgattggcaatgacaaacaaggacagatgatcgtgttccatttgatagaacttttgaagaataatggaagattaccaagaccagatggatgcccagatgagatctatatgatcatgacagaatgctggaacaataatgtaaatcaacgcccctcctttagggatctagctcttcgagtggatcaaataagggataacatggctggatgaaagaaatgaccttcattctgagaccaaagtagatttacagaacaaagttttatatttcacattgctgtggactattattacatatatcattattatataaatcatgatgctagccagcaaagatgtgaaaatatctgctcaaaactttcaaagtttagtaagtttttcttcatgaggccaccagtaaaagacattaatgagaattccttagcaaggattttgtaagaagtttcttaaacattgtcagttaacatcactcttgtctggcaaaagaaaaaaaatagactttttcaactcagctttttgagacctgaaaaaattattatgtaaattttgcaatgttaaagatgcacagaatatgtatgtatagtttttaccacagtggatgtataataccttggcatcttgtgtgatgttttacacacatgagggctggtgttcattaatactgttttctaatttttccatagttaatctataattaattacttcactatacaaacaaattaagatgttcagataattgaataagtacctttgtgtccttgttcatttatatcgctggccagcattataagcaggtgtatacttttagcttgtagttccatgtactgtaaatatttttcacataaagggaacaaatgtctagttttatttgtataggaaatttccctgaccctaaataatacattttgaaatgaaacaagcttacaaagatataatctattttattatggtttcccttgtatctatttgtggtgaatgtgttttttaaatggaactatctccaaatttttctaagactactatgaacagttttcttttaaaattttgagattaagaatgccaggaatattgtcatcctttgagctgctgactgccaataacattcttcgatctctgggatttatgctcatgaactaaatttaagcttaagccataaaatagattagattgttttttaaaaatggatagctcattaagaagtgcagcaggttaagaattttttcctaaagactgtatatttgaggggtttcagaattttgcattgcagtcatagaagagatttatttcctttttagaggggaaatgaggtaaataagtaaaaaagtatgcttgttaattttattcaagaatgccagtagaaaattcataacgtgtatctttaagaaaaatgagcatacatcttaaatcttttcaattaagtataaggggttgttcgttgttgtcatttgttatagtgctactccactttagacaccatagctaaaataaaatatggtgggttttgtgtgtgtgtgtgtgtgtgtgtgtgtgtgtgtgtgtgtgttatttatacaaaacttaaaatacttgctgttttgattaaaaagaaaatagtttcttactttatttttactggtatgttctacttttttgaaagttgtactgaagacttctgattttgggttgaagggaaggaaaaggaagaaatgttttttacattcattattatacttaaagcatttttaaagcattttaatagttctggatgcagaaatcatctaaaatgacagtgaattaggttttaaaaagattttagatttttttgaaagtttaatttttatttgtaaagactcctcaaggatttgtatatgcaacacagtaaggagatcttccattttactacctttcaagtgaaaaatagcctatcatacaatatgcttgatttcagattttcatactaaaacttaactacatacttaaaagtaggttcttatcaagggtctctaacattgctttttaaaacaagatgtgaactaacttttcttaaacatttttttaaatgcttcatcttttagttttatataaagaatcccacatgtacattcttgtttttagaatggggtgactaccttattataaaattccaagtttccaagagacttcttttcattgaggcttcgtaaagttttccattttgattctgactacacataaaaataagataaccctgtagttattaagttggttctgtacaagaaacaggtaagtaattattgtaccagttaatgccaaaatatttttcacgttaatattcttcagaaacaagggtaaaggtattcttagaattatgtaattctgtaactattccagtatattaagttatacaatctttatataaatgactttttccatgggtacttgtttggaaaatagtcactttttcacgctatttatatatgctgccagtaacactataatttgctatggaagagtgttcttttaacctaaggcttctagtttacagtcaagtgtaattttcatcacaactataacttctggtatttaaattttatttaaacagctacaaaagagttagcaaatacctacagttctgtatctatagagccaatcttgatggtgggtgtggcattatgtgctcactttattgagcctatgttaatttctttagcatgctccccctaaattgaaatagtgatgtagtaaatattcagaagcgattttcttttgcatttttacctaaccaaggaaacgggccacacaccttggtttagggatgttgtgatagcttaccttccagtttttaagaaatgcttcctacaactgctgtcaaccactgtattgtctttaatgaacactgttgtatcccatcctaattcttgtactgaaattatttctcatgaaagtttctctaatatttctaatgaaagtttctctaatttgggggcataatgtactaagaatcagtttgctgtatattagaataaatagtaacagtaagtcagcaggattatccaaacaaaagactaggttttatgagataagcttgatttaagaaaaaaacaattaaagtatgaatatcagaaatactgtgtgtttactctcagattttagttggttggatttaatatcaagataactagctgctaagcgtttcataattctcacagtgatattagatttcaaaatgacactgagagaactgaaaaactacatcagtcaaattcatgtatgtatatcatatagcctttaactttttacattaatcagattcttagtaaaatgcagactgtatacctaaatattaaaatatttacttttataatcttaccttttatttcaatataaataaaattcttcttaggttaaaaaattaatttcagttgtgtttatgccagatggcattgcttagttggtgcaagctctcaatatgtttcattcttttttatagtctttcacatttataaggaaaagccttatctccaactgaaacaccagtcttactactacggttttaaaagttgttaatgatcattatctattataaggcctttatttacatagcaaattgcttaacattttattttgaatataacagatttttaaaacgagacctttaaaggagctctaagagtccctgttctagttatttgtattataagcttctgtgaatgttttaattttaatagcagtagtaggaagatatatggcagtagaagcactcatatacatgctatttattgaggtaaagtaaatcatctttgagcagtgtgaacagacagaagcatagcttttagatctgaattattggtaaataacagatagatcaaggtggtatggaaaaatggtagagcaggcatattacagagacaacaggcagctaagaaggcaaattatcagttgcagatgataagacttgtcacaataagcactaaaaacacaaagtgtgaaatggaaaaatctgttaccagttatttattttcaaacacagttgtatacatagatgaaaatgtttaggtgcttttcatacacagataattaagtacatggtatttaataataaaaaagtttaaggtcctccaaatacttgaggtatatattatggaaactcagagtatgaattttcttttttttattttttttattttttatttttttttttattttttttgagacggagtctcgctctgtcgcccagcctggagtgcagtggcgcgatctcggctcactgcaagctccgcctcccgggttcatgccattctcctgcctcagcctcccgcgtagctgggactacaggcgcctgccactacacccggctaattttttgtattttttagtagagacggggtttcactgtgttagccaggatggtctcgatctcctgacctcatgatccgcccgcctcggcctcccaaagtgtcgggattacaggcgtgagccaccgcgcccagcccgagtatgaattttctaagagcatgtagtataagattgtgagttggaatttatttactgaaatgaaaaacaatgaagttaaagaaatcaaagatactaaagcaaatggaaagataaacctaacaaggcactcaataatgaaaatacttagtggaatactacttgaagtatacatatcatactttcttcctctgcttaataattttgttgaaggctgttattacagtgagcttttattggctatcctaaattttaagtatattagaacaaaatttattattatgtccttagtaacatttaagacccctcaattttttattagagaaaaaaagttgtttacagaatcaaagacttcatcttgatttttaagaacaaatagctgaattctttaacaccaccagttaacaatttttttttttttttttttgagacagagttttgctcttgtcgtccaggctggagtgcaatggcgtgatctcggctcactgcaacctccacctcctgggttcaagtgattctcctgcctcagtctcccgagtagctgggattacaggtgcccgccaccacgcccggctaattttttgtatttactagtagagacagggtttcaccgtgttggtcagtctggtcttgaactcctgacctcaggtgatccaaccgcctcaacctcccaaagtgctgggattacaggcatgaggcactgcgcccggcccagttaacaattttaatctgcataaccaaggtatataagccgtcatgtgcaggctgtagggagcccacagctaaacgacaataattggattgtattgattgatagcacttactgactacagttaagaggcatttaaaaattaaaataatagtatttcccacaaattctgccagaattgtttttttaaaggctgttataaatccttgtttctatcaataattttgaagacagtgtgaatctcatggtaccacttttttttacctttattacttttataactgctttgcagtttgttgaatagaaattcttggtaataggagtaaaggttgttgttgacaaagaaacttgaaactgagttttaccttcttattgaaggactttgaaaaatgttgaagttgaatcctagaacagtgagcataccattattccttaagaaggcaccattcatttttaaaattatttcagaggaagaaaattctaaaaattgagactttactgtacagaacaatccttttctaaaacatagtttggaaatctgagatctaaagaatgatgaacatggtgctaggaaaaaagaatttcagtttctatcatctaagatcattcacatttaatgggaatttttttcaacatctttaatttctcttattttaaaactactgtcctaaatgtggaaggtgagagtatggacaatacaatcaaatgccaaaaataccttggttctagtaattgcctaggccattctctcacagttgctccaacaacttagctgtttaacaatcagattcttagtaaaacattttttctttttcttaaaaaaaaaaaagactatccatattgcataccacttcagacttttctacatagacattcacccatcaatactgacagtgcaagctacgtacaacttcaagttgcatcagataactcatattaatggttgtagtagtgaaactgatctcctaagtatgttgataaagtcctaaatcttgttcaacatattaagaataaagaagagtagataaaccaattatggatgtagcaaaggaatcctggataatcttacttgagggtgaatcctgatggtgtatcaatttaaaattccctgttaaacattcagacaaaattagaagattacaactttcagttctgctaccgctctgggaatatgagccctaatcatagttttcagggagcctaatttggtgtggcctcaaataatctcatcatccataaagatcccagaggaagggtatgttggacctggggtagtgagagttggaatttcatatattctttctagggcatgattttttcagcagaggtgttatgcctccaagagtgtgaaaactgatgttggaggatgaaaaaatcatataaagcacagaaatacagtacataaacagatatgcagtgatattagagtgtcatggtagaggaaattagggaaagatgtctaaaatgttcctggtgggaaagttgggggaggataatgcaaaaaaaaagttgagaaacactactttagagtgtgctcatatagacataggtcaaaccagcactacctcagaaataacctcaatatgataagcagatacgacagtgtcagaaaagctaagagtactagatctttaaataaatactgagccaaaaaaaatagtttacacataatctttttaaaaagttaccttatgtcactcatacaggaaagctctggctggcatctagtgggtgcccctctgggatgaagcttccagaggaaggaacaggcagcaatctttgctgttctgcagcctctgctggtgatacccaggcaaacagcatctggagtgggcctccagcaaactccagcagacctgcagcacaggggcccgactgttagaaggaaaactaacaaacagaaaggaacagtatcaacatcaacaaaatgtccactcagagaccccacccaaaggtcaccaacatgaagaccaaaggtagataaatccactaagatggggagaaaccagcaagaaaagggtgaaaattccaaatgccagaatgcctcttttcctccaaaggatcacaactcctcgctagcaagggaacaaaactggactgagaatgaggttgatgaattgacagaagtaggcttcagaaggttggtaattacaaactcctctgagctaaaggaacatgttctaacccaatgcaaggaagctaagaacactgaaaaaaggttagacaaattgctaactacaataaccagtttagagaagaacataaatgacataatggagctaaaaaacagcacgagaacttcatgaagcatacacgagtatcaacagctgaatcggtcaggcagaagaaaggataccagagattgcagatcaacttaacgaaataaagcaagaagacaagattagagaaaaaagagtgaaaagaaactaacaaagcctccaagaaatatgggactatgtgaaaagaccaaatctacgtttggtgtacctgaaagttgacagggagaatggaaccaagttggaaaacactcttcaggatattatccacgagaacttccccaacctagcaaggcaggccaacattcaaattcaggaaatatagagaacaccacaaagatactcctcgagaagagcaaccccaagacacataattgtcagattcaccaaggttgaaatgaaggaataaacgttaagggcatccagagagaaaggtcgggttacccacaaagggaagcccatcagactaacagcggatctctctgcagaaaccctacaagccagaagagagtgggggccaacattcaacattcttaaaagaattttcaacccagtatctcatatccatctaaactaagcttcgtaattgaaggagaaataaaatccctcacgaagaagcaaatgctgagagattttgtcaccatcaggcctgcctaacaagagctcctgaaggaagcactaaacatggaaggaacaaccggtaccagccactgcaaaaacatgccaaattgtaaagaccatcgacactatgaagaaactgcatcaactaaagggcaaaataatcagctagcatcataatgacaggatcaaagtcacacataacaatattaaccttaaatgtaaatgagctaaacacctcaattaaaagacacacactggcaaattggatagagtcaagacccatcagtgtgctgtgttcaggagacccagctcacatgcaaagacacacataggctcaaaataaaggaatggaggaacatttaccaagcaaatggaaagcaagaaaaagcaggggttgcaatcctagtctctgataaaacagactttaaaccaacgaagatcaagagacaaagaagggcattatataatggtaaagggaatcaatgcaacaagaagagctaactatcctaaatatatatgcacccaatacaggagcacccagatccataaaacaagttcttagagacgtacaaagagacttacactcccacataataacagtgggagactttaacaccccactgtcaatattaaacagatcaacgagacagaaaattaacaaggatatccaggacttgaactcagctctggaccaagcagacctaacagacatctacagaactctgcaccacataattggaagtaaaacactcatcagcaaatgcaaaagaacagaaatcataacagtctctcatatcagagtgcaatcaaattagaactcaggattaagaaactcactcaaaaccacacaactacatggaaactgaacaacctgctcctgaatgactactggggtaaataacaaaatgaaggcagatataaagatgttctttgaaaccaataagaacaaagaaacaatgtaccagaatctctaggacacatttaaagcagtgtgtagagggaaatttatagcactaagtgcccacaagagaaagcaggaaagagctaacattgacaccctaacatcacaattaaaagaactagagaaacaagagcaaacaaatttaaaagctagcagaagatgagaaataactaagatcagagcagaactgagcaagacagagacacaaaaacccttcaaaaaaaatcaatgaatccaggagctggttttttgaaaaaaatcaacaaaatagatacacggctagccagattaataaacaagaaaagagagaagaatcaaatagacttaataaaaaatgataaaggggatatcaccatcaatcccacagaaatacaaactaccatcgggaatactataaacacctctatgcaaataaactagaaaatctagaagaaatagataaattcctggacacatacaccctcccaagactaaaccagaaagaagtcaaatccctgaatagaccaataacaacttctgaaagtaatgaattaatagcctaccagctaaaaaaaagtccaggaccagatggattcacagccaaattctaccagagatgcaaagaggaccagtaccattccttctgaaagtattccaaacaattgaaaaagagggaatcctccctaactcattttatgaggccagcatcatcctgataccaaaacctggcagagacacaacaaaaaaagagaattttaggccgatatccctgataaacactgatgcgaaaatcctcaataaaatactggcaaactgaatccagcagcacatcaaaaagcttatccaccatgatcaagtcggcttcattcctaggatgcaaagctagttcaacatactcaaatcaataaacgtaatccatcacataaacagaaacaatgagaaaaacaacatgattatctcaatagatgcagaaaaggcctttgacaaaattctacagcccttcatgctaaaaagtctcaataaactaggtactgatggaacatatctcaaaatcataagagctatttatgacaaactcacagcaaatataatactgaacgggcaaaaactggaagcattccctttgaaaactggcacaagacaaggatgccttctctcaccagtcctattcaacatactattggaagttctggccagggcaatcaggcaagagaaagaaataaagggtattcaattaggaaaagaggaagtcaaattgtctctgtttgcagatgacatgattgtatatttggaaaaccccatcgtctcagcccaaaatctccttaagctgataagcaacttgagcgaagtctcaggatacaaaatcaatgtgcaaaaatcacaagcattcttatacaccaataacagacaaacagccaaatcatgagtgaactcccattcacaattgctacaaagagaataaaatacccaggaatccaacttacaagggatgtgaaggacctcttcaaggagaactacaaaccactgctcaaggaaataagagaggacacaaacaaatggaaaaacattccatgctcatggatagaaagaatcaatatcatcaaaatggccatactgcccaaagtaatttatagattcaatgctaccaccatcaagctacctttgactttcttcacagaactggaaaaaaactactttaaatttcatatggaaccaaaaaaaagagcctgcatagccaagacaatcctaagcaaaaagaacaaagctggaggcatcacactacctgacttcaaactacattacaaggctatagtaacaaaacagcatggtattggtatcaaaacagatgtatagactaatggaacagaacagaggcctcacaaataacaccacacatctacaaccacctgatctttgacaaaccctatttaatatatggtggtgggaaaattggctagccatatgcagaaagctgaaactggatcccttccttacaccttatacaaaaattaactcaagatggattaaagacttaaatataagacctaaatccataaaaaacctggaagaaaacctaggcaataccattcagcacttaggcatggcaaagacttcatgactaaaacaccaaaagcaatggcaacaaaagccaaaattgacatatgggatctaattaaactaaagagcttctgtacagcaaaagaaactatcatcagagtgaacaggttacctacataatgggaaaaaatttttgcaatctacccatctgacaaagggctaatatccagaatctacaaagaacttacacaaatttacaagaaaaaaaacccataaaaaagtaggtgaaggatatgaacagacatttctcaaaagaagacatttatgtggccaaaaaacatatgaaacaaagctcatcatcactggtcattagagaaatgcaaatcaaaaccacaatgagatatcatctcatgccagttagaatggtgatcattaaaaagtcaggaaacaacagatgctggagaggatgtggagaaataggaatgcttttacactgttggtgggagtgtaaattagttcaaccattgtggaagatagtgtggctattcctcaaggatctagagttagaaataccatttgaccctgcaattccgttactgggtatatacccaaaggattataaatcacgctactataaagatacatgcacacatatgtttactgcagcactgttcacaatagcaaagacttggaaccaacccaaatgcccatcagtgatagactggataaagaaaatgtggcacatatacaccatggaatactgtgcagccatcaacaaggatgagttcacgccctttgcagggacacagatgaagctagaaaccatcattctcagcaaactaacacaagaacagaaaaccaaacaccacatgttctcactcataagtgggagttgaacaataagaacatatgggcacagggaggggaacatcacacacctggcctgttgggcagtggggggctagggagctattgcattaggagaaatgcctaatgtagatgacaggttgatgggtgcagcaaaccaccatgacacatgtatacctatgttaacaaacctgcactttcggtacatgtaccccagaacttaaactataataaaaaaaaataataaaagtactgaatcccactgatttaatatctaaaaaaatagttacctaattacaatctctagaatttaaagatctccttcctagatgcaaaaagtgcctcttttttcaattgaaatacatccccaagtactcttctgtcgggttgtttttatatagtcacaaaaaaaataaatataataatcctctcaagaaaagcaggagattttaacaatatgcaccatgttaaaaaacatttcttggttgttcaaggagataataaagtatctttcactattaaaaccatatgttatattactgtgtattaaaataaaaataaaatttcctcaaacagaacatttttgagaaataggaaagaaactaataatgccaaataaaggtcatatctttgctatgaaatttacccagaagacaatgtgctcttcttctttgacttaaaaatgctgccttttaaaagaattggaggcattctaatgggtgtgtagtatagcattgtggctttgaagtatatttttttaatgataagcaattttttcacgtgcagtttagtggccatttgttcatagttggattactacatcctatccatcaaacaaattaattgcacaacaatttgataaaatgttgacagtctttgtagaaggagcaatgtaggggataatactgccttttgctagatgacaaagaaagttgaaagtaaatgaatttttaaaaagcttgaactggatgacttttgcctcagagtattgggtgaaaataaaaagaagtgttatttaaattagacactctcaagtctagacacatccctggttgcttgaggaaaggaaccatattttctaaaaggtatcatatctgctacatgaaatataactagaagagtgctactggagtggtagaagagaatcagagatttagttgaaaccatttatgagctatctgaagaagctaagtccaaagaggttagcttgacttgctcacatcaaagatctgctcaggaacacagccaggctagagcccagctcttctgattctgattagtgctcattatacaacaacatgctaaattattttatttttaaagaaatgagcctaggttgtaaacaaaccacaaattttaatcatttaacaaatcttttttgaaagcttgtagtgaacatggcactgctaaatacttttggtgaacaaaaatgtgtcagatgtcttttcaagggattgttagttgaaaatagactgaaatgtatctttagaaagcattacaaagatgacttgcaaataactgggaaaaaacccacaacattaaatagtacatttctaaaaagaagtttattctgatgaatttacagaagcaaatgacaggtaaaattgaagcagcattagttatgcatttaggaaatatatttaatctatttaagtcaaatcaataacctgggaaatattaacctagaatcaatactgcaaaaccattttgtataaaagtgaatgacaccaactaaagccatatataagaacattcacagctatcagatcagaactctcaggcagaactcatcatattttctccaaaaagcagccaccatccctaatgtacctaatcataataatgacaccacacttatattagtcatcagagctccgaaaccctaagtaaaaacttttgactcatttttattacttgcactttctttccattctctttcaatgcttcatcagtctcttcttttacactcccccataattttgtgttgtgattattatgataaccttctaattagtcttcctaccttctctcattagtcttgcacatcactattaggtcattcttcccaaagcactattataaccatgtcattcttttgctcaaaagctttccaactttctccatttcctacaggataaagtccaacatcccagactgtcaccagtggcagagccagatattaacttcaaaagtaaggaaacctggggtggggattcatttttttttccccttaattttaagttcagggtacatatgcaggtttgttacacaggtaaacttgtgccatgggggtttgctgtacagattattttgtcacctaggtattaagcctagttattttttctggtcttctccctcatcccaccctccaccctctaataggcccctgtatgtgttgttcccctctttgtgtccctgtattctcatcatttagctcccacttataactgagaacatgcggtatatggttttctgcttctacattagtttgctaaggataatggcctctagctccatccatgtccctgcaaaggacatgatctcattcctttttatgctgcatagtactccatggtgtatatgtaccacatttttttaatccagtctatcactgacggacatttaggttgattccatgactttgctattgtgaatatgttgcaatgaacatatgcatgcgtctttataatagaatgatttatatttctttgtgtatatacccagtaatggaattgctggatcaaatggtatttctgcctctaggtctttgaggaatagccaccctgacttccacaatggttgaactaatttacactcctaccagcagtgtaaaagtgttcctttttctccacaacctcaccagcatatgtgttttgactttttaatcatagccactcttattggcatgagatggtatctcatcgtagttatgatttacgtttctctaatgatcagtgatgttgagctttttttcatacgattgttggccacatgtatgtcttctttgaaaagtgtctgttcatgtcctttgctcactttttaatgttttttcccttgtaaatttaatgggttttttcttttaaatttgtttctaagttccttatagatgctggatattagacctttgtcagatgcatagtttgcagaaattctcccccattctgtaggttgtgtgttcactgtgatgatagtttcttttgctgggcagaagctctttagtttaattagatcccatttatcaatttttgcttttgttgcaattggttttgtcatcttcaccattaaatctttgcccatgcctatgtcctgaacggtattgcctaggttgtctcccagagtatttacagttttgggatttatatttaagtatttaatccattttgtgttaatttttgtatatggtgtaaggaaggggtccagttttaatctgcatatggctagcaagttatcccaggaggatttattgaataggtaatcctttagccattgcttgtttttgtcaggtttgtcgaaaatcagatagttgtaggtgtgaaatcttatttctgtgttctctattctgttccattggtttatgtgtctgtatttataccagtaccatattattttggttactatggccctttagtgcagtttgaaatagggtagcatgatgcctccagctttgttctttttgctgaggaatgccttggctatttggctcttttttggttccatgtgaattgtaaaagtttttgctaattctgtgaaaaatgtcaatggtagcttaacaggtataacactgaatctgtagattgctttgggcagtagggccattttaactatattgattcttcctatccatgagcctggaatgtttttccatttgttcatgtcatctctgatttctttgagcagttgtttgtagttctccttacagagatctttcattttcttagttaactgtatttctagctattctaactgtgaatgggagtttgttcccgatttggctctcaacttgaggtgttgttaagtgtactgaaatgctagtgatgttctgcaaattgatcttgtatcctgaggctttgctgaagctgtttatcagcttaagaagcttttgggctgagactatggggttttccagatataggatcgtgtcatctacaaacaaagataatctgacttcctctcttcctatttgaatactctttctttttcttgcctgatcaccctggccagaacttccagtactatgttgaataggagtggggagagagggcatccttgttttgtgccagttttcaaggagaatgcttcaaacttttacccattcagtatgatattggctgtgggcttgtcatatacggctcttgttattttgaggtatattcctttcaatacctagtttattgacagtttaacatgaatggatgttaaattttcttgaaagccttttctgcatctattgagataatcatgtggtttttatctttagctctgtttatgtggtcaatcacatttactgatatgcttgaaccaacctttcatcccagggataaagcctactcgattgtgattgattagctttttgatgtgctgctggattccgtttgccagtattttgaggatttttgtactgatgttcatcaaggatataggcttgaagttttcttttttttgtatttctgccaggttttggtatcaggatgatgctgacctcatagaatgagttacagaggagttccttctcctcaattttttttttttaatagtttcagtaggaatggtaccagctcttctttatacatctcgtataattcagctgtgaatccgtctggtcctggg

SEQ ID NO: 3119 - DNA, 1183 bp, Homo sapiens
gcttctttgaatctgctaatataaggtaaaggaaattgaatcaagttatgtaaagtgtggagggaatgatcccttacagtttaggttacatcatataattctaaaacacaacggatgtaatgtgagttaaaatctgtaaacaataaagtcatataataagagattgttcattttgttatttgatctacagcacaccaaacttctggatggttgaaatttctgagcaaatctcagaagagataaatgacttctgaaacattttaagtctatcaagttcaggatgtgtttcaccattgcctgcttcctgggcaccaaaatgtaccaagaagagcctaaatctactggagactcaaatcggcattaccactgcagtttttgagcatttctggagcagatacagcattccaaaacaatccagaagtgtcacctctcctcagcccacacgccagaacttccatgtaaatgcctcatgtgggcttcccatggtgtctaacggatactttcaactaactgggtctttcttccctaccctcttccagatctatgaaaatacctgaggtttccatttctgtgcctcatttattgactatttcaaagtccagttgtttctctggaattttaacaacacaagaacgatatccacaagacagaaagacaataagggaccaacaggagacaattacagaatactcatgaagactaaaaaaggctgaaatcatcatcatttcccatatcagggagatagttacgacactggacaaatatctaatgctgcctttcaatcctgactcaacaacttactgaatcacttaaactctttggcctcagtgtcttcctgtgtgaaacagaagcagatctttgtctgcttcacaagttgtgagaataaagagaaaatgtttgtttatttgcttgcttgctttttgagacaggatctagctctgttgcccagactgaagtatagtggcttgatgttggctcattgcagcctccacctcctgggctcaagtcaacctcccacctcagcctcctgagtagctgggactacaggtatgtgccaccatgcctggctaacttttgcattttttgtagagatagggtttcaccatattgtccaggctggtcttgaactcctggagctcaagtgatccacccacccctgcctcccaaagtgctaagattacag

SEQ ID NO: 3120 - DNA, 7390 bp, Homo sapiens
ttctttctttctttctttctttctttctttctttctttttctttctttctttctctctctttctttcttcttttctctttctctctgtcttttgtttgttcgttcatttttgagacagagtctcactctgttgcccaggctggagtgcagtggcatgatctcagttcactgtaacctccacttcccgggttcaggcgattctcctgcctcagcctcctaagtagctgggattacaggtgcccgccatcatgcccagctaatttttgtatttttactagagatggggtttcaccatgttggccaggctggacttgaactcctgacctgaagtgatccgcccgcctcagccttccaaagtgttgggattacagacgtgagccactttttctctttcttaaaacattttgcccaatgctaaattttactgcttggtttcaccatagtaatctgctctagaagaaaattaccacaggtgggattgtcaaggtgttccgggataatcatttctactttctttctttttttttttggagacaggttcttactttgtcacccaggctggagtgcagtggcgtgatctcagctcaatgcagcctcaacctcccaggctcaagctaccttcttacctcagccccccaagtcgctgggaccacaggtgcgcaccatcatgctgggctaatttttgtattttttgtagacacagggttttgccatgttgcccaggctggtcttgagctcctgagctcaagcgatctgcccgcttctgcctcccaaagtgctgggattacaggctgagtcaccatgcccagccctcatttctattttctacatgccttttttttttctttgctttcattgttcagcttcatgccatgatcttattctgaccatgatgaaattagtagaatagatcttcacttacgttctctgctcccagtgactaatgtagagacaagagtttttatattatttgaatttttgttatgaaaaaatgtaaacattaagtaatatagacataataacttaatgaactaccatgtgcccatcacccagcttcaactcactccccaatcaaggtgagtgtgtatctcccatgagtgagtaaactaccacgtgcccatcacccagcttcaacaagcatcgactcactctccaatcaaggtgaaatatcagacatcatgtgattttatcggttagcttccattataattgttgctcctttgaaagtaaactttgcttctcttcctacctgtaagtttctgtttgtctttttttttcaacagttatatatgatacacctaacttgtcattttattcaccctgctggagttcataagcctttgatagtatgtagtttgatattttctatcagttgtggaaaattcagatattatctcttctactctaggttatggggaaattgtgatttataaaaacaaattttaggccaggcacagtggctcacgcttgtaatcccagcactttgggaggccgaggtgggtgggtcacgaggtcaggaattcaagaccagcctgaccaacatgatgaaaccccgtctctactaaaaatacaaaaaaaaattgggctgggcgtggtggctcacgcctgtaatccgagcactttgggaggccgaggtgggcagatcacaaggtcaggagatcgagaccttcctggctaatatggtgaaaccccgtctctactaaaaaatacaaaaaaattagccgggtgtggtggtgggcacctgtagtcccagctactcgggaggctgaggcaggagaatggcatgaacccgggaggtggagcttgcagtgagctgagatcatgctactgcactccagcctgggacacagagtgagactccatcacaaaaaacaacaacaacaaaaaaccaaaaaaaaaaaatttttttgaggtaatagaccattaggagcaattgccttagcaaattcattgctctttatgtgcattttttgtttgctcttgctgaaagagctcattgctgatgtgtatatacaagttcactttgaagcaccgtatgtagatgagatgagagtaatgcaattggaagagactttctggtgtgctctgttgaaagttattcaaagtgaagtctggctcagtagggaaggatgttgcaattatgaagagcaccttctaagaatactgtatggaaattttcagcatatatgccataaatttaccatcattgatctgaattgaagtctttattaaaggcaataacagaacttcaatacaatgaaaaagaagaaataatatagaagtaatagtcacatagtagaggagaactaaaatataaaagacatctatattctttaggcttgctaggatctactgcgggaaacattactgctgttaatgtcttttattcacattccaaacaataattagtatcaaaatagtccttatgaagagctattattctttttctcactgttcctctttagaagatacatgcagggtagaaaaacgtaaatctgcttgtataagcagctctgactatttacaaagaagcaatattcttacaatttgattcattatgattttttgttctgggatcagcaaagcataatgactatgttcctgatctttagagttagactcttttagcttaaatcatagtttaagcttctaattcttactatttctgatacccagaaaaaaagtatcattctctctgggtcttggttttcttattaatacaacaatggcagtggtaatacttgtatcataagattaatgggaaaacacgtgagttaatgcccacaatcattgatgtagtaccaggaatatttgaagcaatcaacaaatattagctcttttttagttgccacttgtgaccagattccctttagtttctgtgtctatgtgatgttttcccccattgttagccaacatttgaaatttcttatatttgcatttacttctgtatgcaaatatatttaaaatctaaaatcattttaaggtcatattttaatcttttgagtttgattgagatgtctccaatttataaaatgttgagtttagcatgcttaagtgaacacaatatgttaaaaattctctattgataattatctgatgtgtaagaaaatgtaagaatgaataccacattatacacttccaattcttcattattggtcttgatgggactggagctcaatgcttcagaacaaatttccttgatgccaagattttattttcagtagatataaaatgtcagttttcttcaaaggaagaccaattaccttgacaaacaaaaagaacatgctagaagataactttgtcccctacagtcattcagtgaattataatttttgcattattgttttcaattgtcctccctaacttcaagagaagtcctgatatacgagagtttttctgacaagtacaccattgttaactaactttggtcttatatttacaaagtgaatatttacctaatacatatttacatatatttacaaaatacatctagatttaaacagcttatgtgtgatagataccaacattcccattgtaaaccaatacttacctttgttttgtgatattatgttgcaatgtgcagtctcaatggttgccttattcaggatctctttaagacaatgaactgaaattcacaatatttgcaaaagagaatactattatcattttcaaacatttgggatggcaaataaaacagatatccaaaatttcttacacacaatttatgcattcattgttttaattgaatgaagaacaaattgtaaattatcatttgcaatttatattaaggtatgaacttttacttatgaaatatatttatgagtcaatgactggtgatttaataagcacatgtttgtatatatgattgatgttattctaagcagttagttaacccaggcagtcaggaaaaaacaacctatgctatttttgcagcaaacaccttagacgtagtgtacgtctaatcagtcacaaagtactgtttatcacgacaatgcttcatatatctgtttccttcttcacagtaacatagctttttcctactcagattgtcattatttttatgctgagctattttaatattatacaaactctctctaattttcactttccagtattttccacaaattgcctccagagtaaacacccccaaagcataccttgaataatggtacactttcaatcatcttcagaggctatgaactatttatatgctaaaattctaattcattaacattaaaattatacaaaattgtaccatttacacaattgtactttttctaaccagttatatttttaactaccttcatatatgaaatctttaaactacatgattttgcattgatgtgttctataatatttttatgaatctggcactagagatggcacaatttgaatttttaaaataagaatgaatatccctaatttgaattaattttagtcttaatggtccgtggtcacgtataaaagatttgggagacttgacatgaattgtagaagaaatctgtctgcatttctgctttactgagatcagatctgatccctgtccaataacaaaatcttataatattttacccacaaagtttcagtttagtcctgtacaaactcatgtccccatgattttaagttatctgaaccatgttattccagcttgagtaccagatgcattgctagactcatggaaataaatgtcataagtattgctgagtcgttccctcgccagacccagagtattgaagttgagtatttttcttatgatgatttaatggaaaaagaagaaaatattgtcactagttttccatttgctcaaatttgcaattttccattttgttcccaaattgggttattccgtattttaaatatattctcataggatggatgtggctagtcatggacatgatcttagttgaacgtgaaacaaccacttccctatctttttcaaaatgaactaatgagaaaccaaataatcaagctaagtcttaagtcatcactgcataagcaagccatgcatgaattatttttctacccaagaatattcttgtttatttagcatttcctcctctatttctgtcatatatttgatgatttctggttcatttatgctaaaccattattatccactgaaggtttcccttctaattggtaattcacagataggattagcttatttgatgcagggaactacttctaatggttcaactgcttctctcctcccttttggttactaggacaaagtttgataatagtaaaacagagggaaaagcttctgtttatcaggatattttaccaatttatattttatttcatttaaaagtaagtattcactacacttaaactatgctagtgttctcaaacattaccaaggtgtaattatcaaagtagtatgtccagttgctacaaaacacagcttcgctctagcaataaaatagtcttctatatggagtggtaattcattttatcgaattgtattattttccagctttatttaagtatgactgacaacaattgtgtatatttagggtgtacaatgtggtattttggtgtaagtagacctgcataataattcccacaagcaacttaatatgtccatcgtctcacatagttaccttctgtgtgtgtgtgtgtgtgtgtagtgagaacacttaagatctactctcttagctaatttcaagagtccaatacattattgttaaccataattaccatggtgaacattaaatctctagattttattcgtcttttaactgaaagtttgtatcctttgaccgatatctctccatttcttctactgcctagactctggaaaccaccattctactctctgtttctctaagttcaacttaaaaaaaaagattccacatataagtgatatcatgcaatactttctgtgtctggcttatttcactaagcataacgtcttccaagttcatccatgttttcaaaatggcaagatttcctttttttaaggctgaataataccctctctctatatatgtacacatacatgcaaacacacacacacacatatttacttatattttacctgttatttttagcaccataatctacctagaaattattttttacttttaaaaaaattttttcaaaatctattgttaaatatctgtcattttgaggaacttattttatcatattatatatagacatacacatatatgcacacattatttgtacacagagacatatgactttattattagactccttccttttgttttgatatatttacttcataaacttatcatgtgaaattactcacagctttatttctagaaaggctatatccctacctcttttgttaatatatttcaacatatatatctgggctgaaacagcacaacatcattacagaggagtatccattagaatcttaggccatacggtggggcgcgatggctcacgcctgtaatcccagcactttgggaggccgatgcgggtggatcacctgaagtcaggagttcgagaccagtctggccaaaatggtgaaaccctgtatctattaaaaatacaaaaattagccaggcatggtggcacacacctgtaagcccagctactcgggaggctgaggcaggagaatcacttgaactcagaaggcagaggttgcaatgagccaagatcatgccactgcactgtagcctgggtgacagagtgagaatccctctcaaaaaaaagaaaaagattcttaggcctaggccataccgctacatctgatatttacgaccttgtgtctaacatgtccctgtacagcttcttcatttatggagcataatttcctttttcaattattttctcctttaaacaagtaacacatgaatttactttacaaaagaaactgaatatatactgtaaaaagtgaagaacacctcccttcatggtccctctgacactatttatatcagcaaaaaagatcactgtaaaatgctgtgtatatatattttttgaccgttttcaattttttttgcatgcttatgaataaatttacttctttcttgtttccatagcaacagattattgattgcttccatactaacccttgcttccacattaatagattattgcatgtctttctgacttaattaggtaaatttatacatgtgtatgtgtttgtatgtgtacatacatacttgtttcttatttttaaagtataagtaaatgtaaaatataagtaaaatataacttgacagtttcacacatcaaatttgtatgagagggtccattctccacacattgacctatgaggaaaagtattatttttgtcaattcaatgggcaaaggatgtattttaaaatacattctcatttccatgattacctttgaagttggacatttttcctacttatgtatccttggctcatcttttaaaaaaattctt

SEQ ID NO: 3121 - DNA, 13818 bp, Homo sapiens
atttaaacccagaactgtctactgccaaagcttttgcgctctccctcgtgccacgttgcttctcattttgggcttggtctccacttcccagtccttgaaggagttctccaggtctgccccattagcactgcatctcagaaggaagctgcagctgcgccgccaatctcccggtggtgcttaataaacattatgaagtgcatgaacaaatgaatagcccctgatggacagacatgcttgagaaacactatttttcacattcctatctacactcaagattttacctatgatagcaggctgaagattcccaggatcttacatcctagcaggtaagacaaacaattaaccaacagaatgattaaggtcacagacatgctaaggaagaattgaagccagatgtgataagcaaaataacacctccatccctaaagatgtccatgtcttcatacctagaacctctgaatatgtcaggttatgcagcaaaggagaaataaggttgaagctggaattaaggttgctaatcagctgaccctaagatagagagattattctgggttggctgggtgggcccatgatagtcacaagtgtgcttaaaagtgaaggaaggaggcagaagaggagagtccaaggacaaagtgactacagaggaatggtcggagatacaattttgctggcttagaaggcggaggaaggggccatgagccaaggatacaggcaacctctagaagctgggaagggcaaggaaatgaaatgtcctttatgaaaagtaatgcagccctgtaacaccttgattttagcccactgagacatatgttggatttctaacatacagaactgaagacagtaaatgtatgtgtgtgtgtgtgcgtgcatgcgtgtgtttcctgagtcagggtcttgctctgtcacccaggctggaatgcattggcacgatctggctcattgaagcctcaaacttctgggctccagagatcctcctgcctcagctactctggctattttttttttttaatttgtgttttttagaaatggagtctctctatgttgcccaggttgatgttgaactcctggccttaaacgaagctcccacctcagcctcccatgttgctgggattacaggcatgagccatcacatccagctaagtctgcattgttttcagccaccatgtgagtatcactttgttacaggagtaatagaaaaccaatgcactgagtgatgatattgattgtaagcagggaaggtccctttagaggtctcacaaaatgtaacagtgtaatgaaatgcgaaaaagcaagaactaaccttaaaagagctgagagaagattccagaagaagaaagagctggtattgagttccagagggaggacactccttggcaaaggagacccaagtggctgagctggtggagcaagaaacagagagagaaaagatgagatggagctggagaggttggcagaggtcctctgcaggactgggaggtcatggcaggaggactggagtttattttaagagcaatagatggctatagaatagagcagaagggtgataggttgtttttcactttcttaatgatatccttagaggcacacaatttttaattttgataaagtaaaacttaaaaatcttatccttcatcacttgcagttttagtgtcatatctaagaaatcattgccaaaccctagaccacaccgttttactctggcatttccttctatgagttcaacagttttagcccttacatttaggtctatgatctaccttgagttaatgtttgtgtatggcatgaggcagggatccaatttcattcttttgcatgtggatatgcagtcgtcccagcaccatttgttgaagggataagtaacattttattgcaataaagacagactcagtaataatgctatgctgagccatgttgatgcccaaggcaaaagaaaaaaatcagtaacatagtgttttgtaaatattaaagatacaaattctttctaatttggtcttgaagtctctccctggagagtggctataaactctagccctgccctgacgacagggctccagggaaggcagtttctggatgtttacagcatgcctttcaagggatacatctttatcctggtagactgcctaatgcctaagtgtccggccatggccaggtgttccccatacagaaaacttgcttttattcacagatgtccctgtggctcttgtctaagctgtgtttagtttattcctaccaagatagccactccataggagagccctgaccaggaaagaagttaggctcatgtttgtctgtcaggggagacacaggaggaggcagcacaacaccgagcatgaaataacagacatatttattacttacagattccacagtgcagggggcagtatgcctcccagggtcactggaaagggggaagccactgaggacacgtgcattcagccagcaggtggggagcaagagagagagaaggggacctgtaagccaaattctttattgggtcctgggagttactcaagcaggtttcctgtggggaggtctaactggtggtacaagcaggcattagtttcatgggggtcacgctgtgactaagaggtggccactgtggcacacctgcacagtccatgtggggtgtggaggtcagtggggctaattaggtcagttgtatctggctgtctcatggagaggtaactatcacgagttatataagccagagagctgaactgaccaccttaaggaactaggaggagttgtaaaactggatactgcaccaagggtgactaagcctgcttctggtatgagaaagttaaagttatattcaaaatggatactgaagcaacatgaaattataagaattcactcaatactatttatcttaaaattttatttttttttcactgtgggtttttgcattaattttgtttaaaatattgcatttaatattacttatcctagttactgagaccttgaagcccttttacattttgtgcctaaaataggccttattcacctcactctagttaatgtcctacaaagtccctagctcagcttaccatgccttccacaccctaaaccctgcctgcccctccatctgcctctcaccccccattcctcaactgttatcactaataatacagattagttcatgtttccttgcacacatcatgctatgtcaagtgtctgtcattttgatcttgctcaccacttgacttggaatcacttatctttaatatcttgctctttcccatcctacaagatcaggtgttaactcctccagaaagctttccttgcgcctccgggtgggttggcgctcctcacccaggctcccacagtgccctcctcacccattgtgctcccataattattatagaataataacataataacatagcatgtattaccctgtaaaataattatttattatttgtcttctctccttctggactgcagcactttgtcccttatgtcaaactgtatcttacccacttgaacattctcatgtcctagcacagtgcctagaatatgacagataagtaatagatatttgtttaacagttaatctagctagaagtacagcaaggagaagccaatccaatctgcctaaagtgaacagagaaggttcctcatggaatctccctggtaggaggacacaagttaagcatctggcacagaacgcttccctgctaaaaaggtgagacatcccagagaacagaggctgtgcctgaggcaagagctccttgtctggactccgaggatggaagcaaagacttacaagacctcattagagagtcagccccatagacagaaggataatttagaaatttaataactggatctggcctacaagtgaagcagagaagtggctacttccaaggagtgaaacagtgagcaaaattaagggaaaattcccactgagctcacttcatttattcattcattcattcactagtcatttcataaacatttatggagcatcttttgggggtactgggataggccctggaatacagggatcaaagatcatctccttacccaaagaaatccatggccaagtcaactgctgcaaacctactatgtgtgggatgggaaaccaaaaaatacaggtattaacaacaaagtctagccttcagtgtttttactggattattctatttgcctatccaaatccactctctatctttgtccaccctgctattccctggggaagctgaacctgaaccacactcttgggctcccttgaccactgactaccaactgcacatggccagtgttgtgcatcagcaggagattggaaggagagaagtgagtgagggtgtggcatttattactattgccgtggggtttccatgggccagttctgttgaaagccaggaatcctatgtttcttccgcatagcccccgcagtcttctggctctctttcccctctctccactctttcaggcctacaatagcacctagatttcatagtcctctggcatttgactattcttcgtggtttccctaagccctgctcccagctttgtaagtagtcctttattaaattcatttcacattatccaagtgtaagtgtgccatctgtttcttgctgggaccttgactgacacaacaagctcctaagggagatgtgacaagaacatcaataaacgggggatggaaggaggaatccccttggacatgtgaatgaatatatatggccacccactgggaaaggaggccatgagaaaaagtcaaagccaaacacgttgggattatttgcctttatgcccaggaagctggaacagagcagggagctggtcgaaggtacccgagaatccatccctgaaggatagcagatttggagggtaaggaaagatttctttctacctgagaagtgcctaggagacagtgactctgagttttcttggggtagacagcaatgaaggcttaataagcagaccccccagactggtctcctctccccttgccactgtgggaccttgaggcaaagggaggagcagactgatgcacctcgagtgctatagagaaagggaaacaagactgtttcctgagttgcagaatatgtcaaaaaataagaggacaaaaccacactctgtcaagtcaccttaaagacacgaaataggttctaggcctataaaagtgcctgtggcttagcatagctagaggttatctagatgttttcagtctgagaactttcacctgaggaagaaggacacatcagactcttctaacagcattcgagtcacactactcacatccctcttttcagttccatcctcctcaaaactccttagaggtattatttggttcctcatgtggttttcttacatggaagaagaaccatatgtatgctgatcaggtttaaggtacctaacaagtagaattcatgctgaaaatcaatactttcggcatctgcagtctcctaaaagcattgttagtgagagtcagcctccccaagtccaggaaactcaaacactttgaaaatctaaacccacaaagccaaggtcaaaatcctggcttgggtgaagtcatgaatatcagtgctgcctggaggctccttggaagcccaccatccaccagcctgggacacacacagacacactggtactttgatgagccctgctgcccactaaagtgctgatttgttagaacagccattgtaccaggtctctctcatccctttcttgaacaatggattgctcttccaaacttttttctttttttttctttgacttttaattttaattttaattctttagttgacacagatcttatatatatttattgtgtacagcatgttgtttgaaataagcaggctttctgaaatggctaaatagtgctaattaacatatgcattacttcacatacttatcatttttgggggtgagataccttgatctgttttcaatttcatagcctggcattggctcattgttctatttgactgattctgcctgtcactgtatctaccacctctgtcagattagagtaatccacaaatttggtaagcaggcgtgacctaagtgactgataaaaatgttaaatatacaacctgaggattcttcaatcccatcctggcttctctccttttaaaactttggtctgtccttttcagaactacatgcagcatgacaagtgtggtctagcctgtgcatggcaaagcatgcctctcacctcgttgaaattctctgctcctgcaggctgagatcaaaataactcccttacacattatggctgatattactgaagtgcttctgtcatttttatcctgaagatactaagtcacatcagtgcatcttgttagttttcttttggactcgggtgtaacatgttctgttcctgttcagtttcagttttgcctcattatgcttagaccattgctgcagcctgttaagatctattaggatcctgtgcagaccagactcaacctctcatcactcgacttgtgcctaactctctagtaccatcccatccccacttctgtctctacactttatttctagcaatagtaattgcttcagggcctccccaatgtcttctagactgtgtgtaggatacaatctctcccacacagaaaaagtctcagactaacacaaagatccacatctcaaactccgacccattccactccatgcaacagaaggtaaaaggatatgggagatctctgagtcatgtgaccaggaggctggggtctagtcctgtcttcacccttaaaaggctcttgtctgtcctgtgagcaggcatagggtacagcagtctgaggatacaccagggtctttctgcccctctctagctggagcagaggctgctcttgcttcccaatatccattctctcattcttttctgctcgtaagaacagaccccagtatttagaacagcacatataaacccctgaaatgatggcattgccagctgctttatagccaggagtggtcaagagataaagttttggccaatgaagtgggaaaagtcatgtgtgactgactttcaggagggtcttaaaggggagggaataaatgatctttgtcctcatccacttgcgcctgctgtctgcctggaatgtgaatgtgatgacaggctttccagcagacatcgtaggaccatgcagtaaacttgaggttagaaactggtctgatgattctggaggagaaagattgaagcatggtctcggaaacaccatgccaagcctagactgcctttacgccaacttcttttatgggagaagggaagtaagcttttacacatttaacacacctttcagaagccactttcttctatatttatgatgttatctctagctgcttaactctggaaaagcctcctattctctaaccctatttatccaactgcaaaatgaaactaacaatataacaggaaggggaaaaagatcatatgtcaagcattgacaagacactaggaatatgaaggcaaaaagataaaggcaattcagtctgcagattttatgtgatgatcacctctcattgctcactcactatttctttctttctttcaacaagtatttataaagcctcaacagagatgacagttctgaagggactagggttgccatatttagtaagtaaaaatacagggacaacaaatctttttttttttagcataagtatgccctgtgcaatatttttttattaaaaagataattgttgtttatctgaaattcaagtttaactggttgtcctgtattttatctaatgaccctacctggggctaccatggtgaataacactgaaaaaagcccatcctgcaaggagctgtcttccagtggaggggatggtgcacaaaccatgaagctcaatatcagaactgaatgtagggataagtggcatgaaggaaataaaaccactacagtgtgacaggaaggtgactcttcaagattgtcagggaagtcccgtgaggatgtaacatttccccagatgcctggacattgaaatggaactagccaagccaggggaggaccagtccagcctcaggggccaacgagagcaaaggccctcatgtgggaacatgtttgggatgttctagaatcccaaggccagtggggttaatgttaagtggagagaggtgtgctggagcccagtcatgtaaggcccataggtgatttttttttaaaagaggccatggattctattttaagagtaagtagcagccatcagagggttaagaagggaagaatatcgtccaatttatttattattgtttattttttaaagaaggtcttgattgcttggtggggatgagacagggttggagaagtaaaggcagctgcaggagaatgagtaaggggcttttcaacagcacagctgaactgacagaggcttcagctggagagctgcagaagacctggtgagaaggatcccacgggctatgtgtttgggagtagggcagacaggaccagtgaagagattcactgtggaggctgcaggagagaagcgaatcaaatatgatgtgcagggctgggtcctgagtaactgagtaaaaagttctcatttactgagatggagacactattcctagggcaggtttgtggacagcatggggcagaatattaaggagcttgtcttggccagattccttagattagatagtcaaatggagatgttaacaattaaaagttgcttttattatccctaatttacagaagaggaaactgaggtctcgcaggttagaaaagcaggactcataacaaaacctgtccagacccagcttgcttccccagaccacactattataaacctccctgctgcagacgcgaaacaagcaccaaatgagatcatagacttttaaattataatgattattaacgtgggacagtgtctggagacaggcagggcatggaacctacaggatctagggagcaggtaaaatgtgctcggctctgctttggagctgagtcctccgcacgccagggtcagttacatttccacagacaagctgttccacagccagacttcacgccatcccctctgaatcatttaaattgcctttgctaaataatttacctccatgtagacaaaagggttccacaggctccccaaacattgtgggactggtgcataatttacaaagcattgcttagccgccccgtgcagggagaacaacagggcttggacacctgccagagccaaggagggcaccaactggaaaggaggcaaaacacagctccatcaaacagaggcaaaggcacctactgacacctggattctcaaggccaaaagcaagacaggaaaatgtgagggtcaaactgcctctgggcacaggctgaagccagtgagggaggggcacgtagctagcatgcgtgctggaagtctgaggaaaatatcatcaatgctacactcttcctgattaccaatatcctgagacctaattaattatgtcctttaaaaaagcagcattgcctctggtaagaagcatgtttagcaaatacctgagcattttaacacaggcaagaacgatgtggaattcagacaggaagggcaattttctgtgcctggaatgccttcctccacatcccttatgcacttgacaaattcctgctcctttttccagagctgtcctcaagggttacctcctccaggaagcctacctcactcccagaggcagaccaaggcttccttctcatcgtgaactatgttttatctctcatttcattgtataataaatgttgttttcctcccctggactcaggtccttggtaacagagtttctttaaatctgtagtcacagtacatgattcagtggtagcacattctgtattcattgtagaatgaaggatgaaacaaacaagacatgcaccataacttacaagatattttccccagcattgcatgtagtattgttgctttaagcataaaaattcatatcccaagagaatggcaaagtgtgtataaaataagcaaacataccagaagttgctcagcatcttcaagagtcgttctgccccttgctccatgtcttagcccattttctgttgctgtaacagaatatcacagattaggtaacttataaagaaaggaattttattcatctcacagttctggaggctgggagttccaagagcatgatgctggcatctggtgagagccttcttgctgtgtcataacatggcagagggtatcacatggcgagagggcaagagcacacatgccagctcaggtctctctccctctcttatgaagctgttgttctcatagtggaggctccaccctgacaactttatctaatcctaattaccttgcaaagaccccatctccaactgacatacggatttgggaattgagtttccaacacaagaaatttgggaaacatatttaaactatagtgctccacttggactaatacttcccatttctaaccacctgtcagcttcagctctttgagtttggcatctaattcattttacaatgcctgactcttaataggatgattgggttcttgaatcagacagatatattttttttggaagtttccagccatgccacttagaagctgtgtggcctcagtttagtaagttaacctctctgatcttcagcttccttacttataaaacaggcacagtagaagtatagaggtattaataatgcctacctcattgtaatgttgtgaatattaaatgagatcagtgtatataaatatcttagtgcagtgcctagaacttagtgatcattgaatgaatgttagctattactactgttttcactttactacaagatgtattgtccattctgtcactgcacctgctttctatgttctctaccagtacacacaccttcagttcagccctggacttgctgccatgtatccaataccccatgatcagacccagaacacatttggcaatcataggttctcttcttgtgattataacaaatttcctcttcctggatgcttctcaagatcaagagtaaaaatctgagttatcttaagctatgtttgggttgtcagtctgtgctgctttgaatataactcccccaaaatactgcctcatataaagccccagcttatattagggttacttgtgtttgagcctaaagatacaatggcagttagaatttaaatggcatttactatgtgcttggtactttttaaaagtcatttatatttagtacttaaaaccgaagaggtaccagtatatcttcattttgcttatgagaaattgaggcacagagaggtatcgtatgagggtgggagtgtgtcacactctgctcaggagggcttgctagtcagagctgtaaactaagtttacatccttgggagaagaaaaactttgtccattctaaagggtctgacttttcccagttttagacatcaaggaagaggcaggttctgttatagaaaacccagccttgtaaggcaaggattagatgggcaggaccaaggaatggtcatcattctctgagcccactctctttagttaagattttaatgcatctgaacatattgaaaaagaaggtggcagaaaactggcccttgactcaagatagcttttagacttagggcagggtagggagataggttgtaggaaaattgagactactgttaggtagcaggtatcccatacaataaaatgtcaagtggtaccctctagagttaattcgcttctgttatctgggagccctgttaatcattctttcatgccttggttgtaccatggggaataaaggagtggatttaggttcaccttggacacttgtgtgaaaataagatctgcagtctctggaaccagctttgttggatgcaaagagaaagtgtgtctcagggataagaaagaactccctgctaaccatggggagcttctccatctattgctagccaaggtggatgaagatttgatttcattaaatcacccggcacatttctttacctgcccataggtgagtgagtccataggagagtgaaaatggaggccatttccagccaaacctggaggcttccgtgggtcagacaactaggccccaagagaagaaaaataaataagttaaactcccttcatcgggaaaataaacatcaaatggcatgtgatagtgtgcactgcataagtgaataaaggaggtttaattctttaattattgcctctagtttccccatggtaacaaagggcaagttgatgaagagagataatcagggcataaaatattgtgtctccttggtttatttcacttaataaaataataaaaatatttctccttaagttcccagtcttgcttaaaaaaatgagacagtatttttatctaaactcatttcaaaacagatccataaagatttactgagtacctactatgacactgggttcaatatgatggtctctgctcagaaagcacaattctgacttccccttgacagtccccacaactcacattcacacacttttaagaaatttcaggccagacatggtggctcacacctgtaatcccagcactttgagaggccgaggtgggcagatcacctgaggtcaggagttcgagaccagcctggccagcatggtgaaactctgtctctactaaaaatacaaaaattagatggccatcgtggtgcatgcctgtaatcccagctattcaggaggatggggcaggagaattgcttgaacccaggaggcagaggttgcagtgagctgagatcatgccactgcacttcagcctttcagtctgggtgacagagcgagactcagtctcaaaaaaaaaaaaaaaaaaaaaaaaaagggaaagaaattttagttatctagtggactcttagaagatattttcgtttacaacattcaccatcaagagtctatgacttcactaatattcacctatattcctttgaaagattgtgtctagcaatcttttgtgttcatgttaagcaaactatatttattaagaaatactttgtttccccatttttgtatttagaatttccaataggaatttctttcaagaaataacccatgtgcttttactgagttaatagacttccagccaaagtgtctccgttcactcaataatcatgaatacagtaaatacctgctatgacccaggcattgtttgccatacttgggatacaacagtgaacaaaattctaggtcctcgtgtagcattaattctagtttaaacataaagtcaaaacaaaatttaccaagaaaaagcaaattacattgtatatcatgtcatgattagtgctactggaaaatgcaatgcaaggtaagagagggagtcatgagatgtcaggggatagtggtgatgaatgtggggaagggaggctgtaatttaagagtactgagcataggtgtattagtccattttcacactgctgataaagatgtacccgagactgggaagaaaaagaggtttaattggacttacagttccacatggctggggaggcctcagaatcatagcaggaggtgaaagccacttcttacatggtggtggcaagagaaaatgaggaagatacaaaagcggaaacccctgataaaaccatcagatctcatgagacttattcactaccatgagaacagtatgggggaaaccacccccatgcttcaaattctctcccactgggtccctcccacaacacatgggaattaagggagtacaaatcaagatgagattttggtggcaacacagagccaaaccatataattctgcccctggcccctccaaatctcatgtcctcacatttcaaaaccaattatgccttcccaacagtccctcaaagtcttaactcatttcagcattaatccaaaagttcatagtccaaagtctcatctgagacaaggcaagtcccttccacctatgagcctgtaaaatcaaaagcaagctagttacttccta

SEQ ID NO: 3122 - DNA, 945 bp, Homo sapiens
gcctattgggctgtctgtgcccctggctggagcagaaactgaggaaggaagatcctacggctcatcaagtaaaacggtcttttggggaagaagcattcttagaaatgctgcaccaagagttggaattgagaattcagaaaacatgatagagaaggaacaggaagaaaccatttggacatccaaaaataaaaggccagaatctcactttgttgcccaggctggtggtctctaactcctggacttaagcaatcctcccgcctcagcctcccaaagtgctgggatcacaggtatgagccaccatgcccagctatgatctcctatgctgtttttgtcatcttgttatataaattttgactgttcaatttttatatttgctcattttcgagtcccttaaaaaattttaaagggggaaatatactatctgtaaataaatatttaatggatatactatctgtaaataaatatttaatggaaaatttgaagacagcaattcataatggaaagaaaagggttttggctataatacaggtctgagtttatattcttatccctctgtaggctttgtgagtttgggcatattgctaatcctgattaatacttaatattctcttttggaaaatggaggtaagtggtcagataaacacataaacttactgtgtggattaaagattgttttctctccctatgaacaaggcccattattgtagcatggaaaagaaaagactgaagggaaatacaaatgttgtcatgaaatacaggaagggctatcatgtttcaaagggccagcagagctaggactagtagatcaatgtaataaaaggttggattttgattccaaaagaaaaagcaattctctcactattagatcattctaacaatgagatgagattcttgtcactgcaagtgatgagcaccatctggaagagcagtcttgaggtatctgac

SEQ ID NO: 3123 - DNA, 1515 bp, Homo sapiens
acctgaggtcaggagttcgagaccagcctggccaacatagtgaaaccctgtctctactaaaaatacaaaaattagccaggcatggtggtgcccatctatagtcccagctactcaggaggctgaggcaggagaattgcttgaacccaggaggcggaggttgcaatgtgccgagatcataccactgtactccagcctgggcgacagagggaaactccatctcaaaagaaaaaaataaataaataaaataaaacaatgtataaaattaccttcacgctatgtgtataaggcgtatataaaatataaatgcattccatgtttacacgtagactccatccccaagatttgcattatacatatgcaaatattccaaaatccaaaaaaatccaaaatctaaaacacttctgatcccaagcattttgaataagggaaacccaacctttatctccaatgtacagacaagaaaaaatggagattaagtcccttgccagtaactggcagagccaggacttgtaggtagatctgtctgcctccaggtgccaggccccacagccattaccctattccctggagggaaatgccaaaagtgtagagaaaatacagatggtgcagaaacatttgagaaatgtacagccttgccagaaattaaaggaatgcaaatccaagcaaccgtggagcatttaccacctatcaaatttgcgaaggtttttgtgcttttgctatttaatttgctttacatccaagtaatacatgttcatggtttaaaagagtcaagttgtattacagaaatacaagctgaaaaccagcccactctgccctagcccatcaaacacacacacaccacacacacacacacacgcacacacgcactcatgcagtgggaggaggggaaggcccctgagccaggcctgtctccctgccatggccttgacctactgtgcttccggacctccccacttcctctgggctctccagggactccgggaatactggcctgatatttctgtgatcttcccagtgcagcaaagcaaggggccgagtggcctattgtggagatgggaatggggaatcagagggattatgcagcaagacaccaaaacttgacacagtcacctataatctcatggtgggaagttttctcaagggaaaaatcaacactggccacataatttgtataaaactacatgtggaaatgctatattttcattgcagtaataatataaagagttttgtgttttagggtttttttttttttttttcgagacagggtcttgctctgtcacccaggctggagtgcagtggcatgaacatggcccactgcagcctcaacctcctctgctcaagtgatcctcccacctcagcctcccaaatgttgggattacaggggtaagccagtgcacctggccataaagggattttttttttgaaacagggtttccctctgttgcccgagctggagtgcagtagcacaagcatggctcactgcagcctccaactcttggactcaagtgatcctcc

SEQ ID NO: 3124 - DNA, 4565 bp, Homo sapiens
ccgaaaaccacaaaagaaaattggaagaggaaagaaaaagtcctcaagaaaaatagcccagatttctcatgatctcactcatccttggtcagcaggtggctctcctccacatggtgattcagggactcagattctctccatcttgtgtccccaccaatgtcctagggctgcgagtactctgcccccaactggtggaagggaggagatggtggcgagaaggtgcatctacttctgaagtgccttgggttggagtgaaacacctcacgtcctctcacatctcattagcaagaactaaccaaatagccctgctcagatgcaaagggagctggaaaaggtagcccgcaaggagtctacactatgaagggggaatatatggaattgtggtgtttgcctgctatttctgctactgtctgataagtactttactgcagggggtgcacttgggataccacccaggcgggtaagagaggcacctaacctggatttggtgcggggagtcatcacacattgttccttatttcccctcttctcctcctgagcttgatttcacctctccagcctgcctcttccccgtgtgtatctctcacaccattgcacctgctctttcctgtccctggaatttttctcccacttcaccttgcccttcctgtggctagtgcagtattccatcagggacaagcgtggaaagcattcccccaagaagcctttcctggacccacaaattcagcttgtgttctggtcttttatggaggcaaagaaaggcgatttttatttattggggtttgaaagctgatacggtttggctctgtgtccccacccaaatctcatctcaaatcgtaatccctatgtgtccagggaggtacctgggggcaggtgattggatcatgggggcggtttcccccatgctgttcttgtgatagtgagggagttctcatgagatccgatggtttaaaagtgtttggaagttccccctcccccccctccctttcctgctgccttgtgaaaaggttcctgcttgctcttcaccttctgccatgattgtaagtttcctgaggccttcccagccacgcggaactgtgaactaattaaagctgttctctttataaattgcccagtctcaggtagttctttgtatcagtgtgaaaaaagactaatccaagagcccatgaaaaggcatgtctgctaatcagatggaagttttacacacataaacttcagcctctagagaaaagagaggcaggggagccataaggtgatagggaagtgaggacgggacctcattcattcacacgttcaattttccaatagcttagaggggagaactccagccctttggaggtggagaggcagcgtgggctcccagatcacatcagttcaggaacctacatttctacaagtgggttttatgagttgtttctgagggtttatttctagggaataaatggtacaaattttcaaatgccagttgaggagtgggacatcgagatcgaggcagggcccttcctagggaaacatcctctttgaccagggaggagaaggacatggttatccagccagcctcagtcttggagcagaaggtggagggaaagtagactcctctagggtcagaacaatcatggaatgcatcttccagttccaacagccccaggatcttgtaaaggagcatggggttttaatttttaaatacgagaaatgagcatatttctcctgcagccgagcttatctccttattaaaaaaatattttcttactaattatttctgatgatctcaagggaaagcgccttttgcgattattttgacaagttcatacatgcaaggggcttgctgatcctgcatttacaaggcgatggttgcttctactgtttaggttaccattagagttccctaaaaatagaaccatgagctgggtgctcagaaacaaacttggcagaatggtttaggaaggggactgagctaaccccattgggacagaatacagtcggtttctcttattctacgctccagtctgaaagcatggttttctgaggccacgcgctgggcctgtataccataagagagtaatttcactgtgagcgtaatgataaatgcagaaactgaaggcaaaatatccaagatatggggtccgtctttaagatcagatagaccagttcttgattagcagccattcaggaaccctcagactctcagcctgtgggtggtcctcagtgtttcttgtgacttcttagcccaagcccaaacattcactcattcaccaaatattgatagagtacctgctgtgtgccagccaggcgtgggccgctgcacttggcccaaactgccttttttcattgtgttggtgaatgcgtgcagagatggaggtctgctttccaatcttacaggaatttgcttttcggtgaaaaggaaggaattgatgaacacaaacagccttgtggcccctgttcagagaaagccaatggaagttggtggaagaccaaaccactcctttctgttccttagaaccacggggctgcccaccaccgggcaagtgtctggcttgtgagagtgttctgacttttctgcagagaacttcaggtctcattgtcccatagagcaactttgaccattgcccaaataaatccttggatctggctggttaacagcagctctgttgctaataaatcctttgaaatcttttgccttgtgtttttcatgacatatttgcatgtcaggatcatttgggttttggagttgcggtctcctgctgttcctaacgtcataaacggatagtaataacccaggaggggattatgttttggggttgcaagtagatgagctttaaaaacattaatcttatttgtgggcaaatatggctaatgatagactagggaaaacaaaataattcaaaatctgcaatgaatgcttggttatttccaaagggcctgctttttaatgaagtgcagtaaataatgaagaataagaggggaaaaaatgtagaaacagcatcccaggagtttcttggtggtgttgtttttgttgttttaataaaaattaaaatagacaaaccaaggcaagggagtagcattgacctccactcccaagtggggctggggctggacctcagggctggatcctatctgtgggtcactggtaaaagcaaacctccattactggggttctctgcgatgggtgactttgccccaggggacactggcaatgtctggagacatttttggtgtccctgggggtgctaaacatctaacagtgcacaggacgtcctctcttaacaaataattatccaggccatgcgtgttgctttatgcctgtaatcccacctgtctgggagacccaggagggaggaacacttgaggccaggaccagcctgggcagcatagcaagaccacctctacaaaaaaattttaaaaattaggcaggggtagttgcatgcatctgtagtcccagccacttgggaggctgaggcaggaggatcactggagcccaggagtttgaggctgcagtgagctatgattgtgcctctacgctccagcctgggtgacagagtgagaccctgtctcaaaaaaaaaaaaaaaaaaaaaataagatctatccagcccctaatgtcaatggtagggagaaactctgcttcctggctgccccctgtcctggcctcatctcccgtgtggattggctcttgccacactttcctgggagttatttcatctcaaagtgaagcctgcaaggggccttaacattatctaatactaagttttactgataggacttgcaggacttcacatagattgaatggctttccaaagttcacagtaacagaggtgggatcaatcaacaggaaaaattattaggagcatttgtaaaagaagaggctttacaggctttttacattctactcttggatgcttactttgctgatgcttacaagaactgtttgttgagtgtctgttaccatctatctgctctgctaccatctatcacccgaagaaacatgaaggctgtcttaaatgggccgtaaaataataataatagtaataataatgttgagaacatttgctgagtgtttactctgagccaggactatactaaaccttttaataaatcctggatctcattaaatcctctccacgaccctgcaagcaggcactattaatgttcccattttacaggtgataaaactgaaacgcaaggagcttaggaagcagcgggtgaggaatctgagccttgctcttctggattgcagagcgggcactcctaactgctaagctcaccccttttcctccctgatgcttagcaattcagttgttcctgtagttaggaggcattgttttcagggtgtttgaacctaaactcaaggagaagaaatgtacatacatccttctggctcacactgctcaggccatcagtggggtttttgccagtgttttggttgctgctggttttggatttttcagtcatatcaggactttagtttgacttccacaaatacttttggtgaagatttactgtgcccaggaggtagctaaacattgggggttcagcactgagcaaaatacttgtcttagtttgcgtttat

SEQ ID NO: 3125 - DNA, 4613 bp, Homo sapiens
gatgcccccgcccccgccgcgtcagggttgctccctgcgcttccgagtggcgactgcagcgggtccggtgcaggtgaggggcgcgcgcctgcccagctttgcagcccccgaacgcggcctcgcacagatacccagacaaatggattctaaaatttgaatagaagagcaaagaaaataggaaccaatttgaaggactacaaggtggactgcttgctcagctcagtatcaacacttatggagtcattgcagttttcagtagaggtgtacttctgagaagtggcttcttgggtcttcatgcagccatggatctggataaaccatctgtttggggctcattaaaacagcggaccaggccattgttgatcaacttgagcaagaagaaggtgaaaaagaacccaagtaagcccccagatctacgggcaaggcatcacttggaccgccgtctcagcctctctgtgcctgatctcctggaggctgaggccttggccccagagggccggccttactccgggccacagtcttcctacacctcggtgcccagcagtctgtccactgcagggatctttcccaagagcagcagtagctccttgaaacagtctgaagaagaattggattggagccaggaagaagccagtcacctccatgtggtggaaacagactcagaggaggcctatgcctctcctgctgagcggagacgggtgtccagcaacggcatctttgatcttcagaaaacttcccttggaggggatgcaccagaagagccagagaagctatgtggaagcagtgacctgaatgcttctatgacatctcaacattttgaagaacaatctgacagtcaaaagtttgaaatgactcaaaaatttaattgggctcatgtaatacatattcaaaaacagacttgaattctacaatatggccagcaggagttgatgcatttctggaggaggaagtgactgagttgcgggaaggtaccgggggaagccagtgatggcttgagtaacctccccagcccttttgcgtacctcctcaccatacacctgaaggaaggccggaacctggttgtccgagatcgctgtggcacaagtgatccttatgtgaaatttaagctgaatgggaagacgctgtacaaaagtaaagtcatatataagaacttgaacccagtatgggatgagatagttgtattgccaatccaaagccttgatcaaaagctacgtgtgaagggtatatgatcgagatttaaccacatctgatttcatgggttctgcatttgtcattctcagtgatcttgagcttaacagaacaactgaacatattttaaaactggaagatccaaacagtttagaagatgacatgggagtgatcgtgttaaatttgaacctagtggtaaaacagggtgatttcaagagacacgtaagtgggaccttctattcttttgaaacctctcattttgtcgttttgaaatggctcattgcaattgtcccttgatagctagcagatgactgatgtttttgcaattattttagggggggtgcaacattttatggagtcttaaaatatctgttttttaatacaatgctcttctttgaggaaccggaaaggaaatttgttaaggaattatttcttttgtgttattaagatgatcaggcatacatttgcagcattttggtttcttctttcttcttttacttttagctaccaagttttccattgggagttcttttgggaagatacaaattttaatgttctctagtctagtacatgcaaatttctagttgatacagtacctatcaaagatgtctgtaacatcagtgaagcattagactttgtcacaatatgattgggactcttcttttgagcaaaaatgtggatacaaatcataatcttattttatttgggattatattttataattctaaggctatattagaacaaaagcatctttgatgatgacttatttgaaaagtatttttaaagccaattgaagtacctgctttttaagatgtgttataatttagcatgtttataatccaatataaaaatataaagcctatttataattaggtctccagtaatgcttcttgaattgaggcagtggggtgggtgaggagaatatttttcttttgacatcacttatgcttctagttgtagctttttatgatgaaaaccgtgattgatttactagtaaactcagagaagatagcttaaagcagtaggaaaactgtagtgtgacttttcagttaccttttcaaagattcaactaaatatctgctatttttaacttgagttccttttattacttctttttaaaaagtggccctgttgacacttgtgacctcaataaaagagatattttaatgttaaaatgtcttaaattaatgttgaaaataaaagtattttttctcatcccacctaaagaaggagggattttctttagcttcttcttgatcttgacagcattgctgctgcatccgtgactctggattcagtgtcagtgatacagtaggtgaccggtgacttgagctgggggctaggttatagcatgcaatgtaaatagttatttgtcacgtggttgacaacttgccagctgatatcgtcaaaaaatttcttatatattcaagtggggcttgtaaaggtagttgatttctccatgaaaatagctgcatattcaaatgactgcctttgtgaagttttctatagcatattagattatgtttagcagtaatattggcacttaaaagatatttaatattgtcaaaatttagagttttaacataatgccattttagtttcaatttatttcaaattgcagaacagttaatactagactcagcttggagctgtttttgtaaaagatctcaaagagactatgttttcagggctcaagaatagccatatttcctcttagtgtaggcctggtttcctctgactccccacctcccatgttgaagactttgtcagaatgtctgtccgctcactcatgtgcttccttattttcttttgtctttgtctggcagaagcctagtgtacactatattgattatatatacacacacaaatatatttttatccccatatatacacacacacacacatatatatttatatatacacaaatatatatttgtctccatatatacgcatatttatctccatatatacacatatatttatctccatatatatacacacatacatatatatctctatatatgcacatatatatttatatatacacacacatatatatctccatatatatacacacacatacatatatatttatctccatatccatatttattcaagttgggtttgtaaaggtagttgatttctccatgaaaatagctgcatattcaaatagctatctttgtgaatttttatatccatatttatgtatatggagatatatatgtatgtgtgtgtatatatatatggatacatgtatatatacacatatatatggatccatatacatatatacacatatacacatatatgaatacctatatatatatacatatggagataaacatgtatatatataacatatatatatataatggaaatatagacaactgcctactcttatctcttctgattggtagtttttttccatttatatatttgatcaaagaaaattaattgaggaataatttattctgggccatgtgtggttattcagctaacagtgcatattgggagccttggggtaaaatagattatcagaatctttgttcttttcattgagtttgagttaatatttaaagagatttttatattgggattttaagtgggaataactagcacttgggactggaaatcagtagattatttgggtgagataatttgtttataaatttccattttaatttaaactctgatggagagatttcagtttaaattctcagttttttacccctttttcttccagtcatctttgaggtagcctttgttgctttagaaccaagctgacaaaaatctcagtatgtacaaaatgtttatgaatttactcttgtgtccagggacttaaatgtatatgagaatggtgcaggcagaagggaagacactggctgcaaggctgacaaacatactctgtgttctttttttgtggcaaaaaacaggaaaaaaatagtagctaaaattaggagctctgttctcagactgcctgggtctgaatcctagatccaccagtggtctggttaactcaaagaattatttaacctctctaagctataatttcctcatatgtgaaacaaggataaaaagagtgtctgttttatagggttgtgaagattgaaattatcaaatatggtgcttggaattgggtagagacactcaatatatggtagttggtagcattgtaggaagtgaatagtaatagtcattttccattaatttatttacatgctttatcttgtgtaattgttaaaaaatatcaaatgcgttcctatgtgtcaaaaggcctaaatagccctgtgtacctaaaagatggtaattaattttggtggttggtttgggtgaaaatatctgtcactatttcaggaaaatacaaaaaaaaaaaacaaaaccctgatattaatatccaggttatagtacctataactctgtcatag

SEQ ID NO: 3126 - DNA, 4209 bp, Homo sapiens
cccactcctgcccgacctgcctgttaccaagataaagaagcaggtgaccagcatctggcatttggcaaccctgactcgactccaaggccccatgacggttcctctcctctcctctcctcccctcccttcccctccctgtggtttccagctgggcaggggcctcagaccgcagctcactgcccaggaggtaggctgcatccgcccctctgtctgtctgtcaacatcgccctaggaccgagctgctgggtgccccggaagaagggcaggcaggaaggggaggggcagtgaggttggctccccccaccacctcaccctggtgcccccagcccagcccaagacaccagggcatttgctgacatctgaggcccttcccaggaagacatggcctcgttcttggtgtggccactgaggacggcgctgagagggggaaagtcatgggcaggacctggtgtgggatgtggaggagacggcgcccggggaggaggaggtgagctccccgtcctgggagtgagcaagtgtggactgggccttgggggcgtaatccttggaggaatttggatggggtctccttggaacatcattattgaggtgttcttaggaaacaccctttgaaatgtcctgtgacagcttaagttttgagaaggtcgttggttttaatgccttcgtgggcggcactcatggatattttgtcgcagagccttcttggggccacaggggtgggctggggcctcgctcacactcacgtggggcctccagggggaggctttgtaaacctcgaatttgcaattacaccgagccgtgtaattacgtatgggtgggggcagcgctgcggccccagtacaggcagggtttccgtgggcctctggggcagggtgggcctgaagagggtgaaaatgttccaggtgaatccatcattcagggaccactccgggccctcccaggagtgctaacaggcggctctgctcgcccctcggtgctggaattgctcctcctgcatttggtcaggacctcatcaagggggagggggccccaagacctgcaggcatggcaaccccagcgtggctgtgggaagagggcccagctgccgcccgctcaggaacgctgctggaggaactgctgaggccaccgcctccctccctctgcggagggagaaccaggagaaccaggagggacaaccaggacccccgtccagcccagcacccccaggcagcaccctctgcagctctggcccccaggaattcccaccctgagtctgtgggggcttgtggagacctcagatgcctggcacccacagtgtcacttcagctgggggcctaggtgtggctcagactggggcgcaggtatgaatgtaggggtggcaacaagagtgaaggtaccaggtctaggggcaggaggcccccgggctgtgcaagtgggcagcccgtcctctccagggaagatgagctgctcttggctatgtctggttcgcccctagaattgtctctctccaaccttgacctccctggagctggtgaggcgggcctggagcaccacccgcttctgggacacctcttcatcaggtggcctcacttgtcatctcaaagtggcgtcgaaccccctgacaggtggacgggaacccccggctggccctccagagaccaggaggcccctggctcaatgatgccacctgcagctgcccaaccctccgcccatggtgcccttgttccacctgccaccgctcatgaacctgtggatcacccagctctgcactggcttgcctgctgctgctgtctcagtttacctgggcagttgcccctggctatccggctgggatgggacttggacttagaagcaggcccctcctctggaaagctgtgtcctcgggccaggaggtggcagcctctaccttcctgagacagggacccttttctgtccatcagaggacagctgtatgaagacacagagagaaggcagccatctgtaagccaggaagagagccctcaccaagactggaatcagcagcaccttgatattggacttccagcctccagaactgcaagaaataagcacctgctgtttacatgcccagcctgcagtgcttccttatggcagattggagctaactgagacagctcccagcactcattcattcattcattcattcactcacctcatgtctactaaacagctctgggctggctctgggaagcagtgagtcacacacactgcccccagcaacgtgtgaaatatgtttagagacagtgggctacagcggaaagggtagatgccctgagaaccccagcggtgctggtcagaagcacaggccttgttgggctgaggctggcatggggtgaacctggggagcctcgggggcagaggtgatagatgtggggtgtttcaaggcagtgagacaaagaagggagatgggtggtgccccccaatgccaggcttcaccagcctcccaacacacgagtgttcacccgcctggatgagacacctctgtggacttgggagtgaaggcagtgaatttgggcaatgctggaggccgtgcaggtgggaggtgggacaggggcaagaggccggggcccaggcaggagctgacagcccaccagtggtgctcccctgagaagcaacctcagtgggtggcttggggtctgctgggctgtccccacactgacaccctggctgcagggcccccctgtgtccccagtgaggggtctcgggagctgtgtgtcctactcagggccatccctgcagcccatgctctctgggtgaccagttgccagcagtgtcccccctgccttgggcggaggctgaggaccccagggtgggagggaaggtgcggtgggggctcagccaatgctgcccagcctgagggtccctcacatgtgggccgcacccctgcgtcagccggagtgatctctgcttagggtggtttgaggtgagttctgatatctcaaacaccagcatcagggccagggcagacaaaataagagtgagctggtcaggggtgtcccagttgggagctcgctcacagtctttaaggaggcagggcacagcccagtgggggtggccacgaggccccgggcctgtggctgagatggcaactggcaccggcagtgattggaacagtccagcccatggagccctgtggccttggccggtggctcacggtgccacgggagctggagcaatgggtggcctcccttgcctggtgcctgagtgaaggaggactgggtgcccctgaggaaggaccttgccatactcctacaaatttacattattcttctttccccagtctcccctcagggacctgcagccatttgctggggtggctagtggaaagggggatcatcagactcagggggattactggactctaactctaacctgacacccactcctggggacacaaacacccatcggatctaatagtcagaggaggggcgtatggaggtcagtgggctcacggagttctagctcaggtccaaccctcggtgggtgcagaggtcacttccctagcctcagatgggtgagtaaacagacgtatgtggcagccagcagagcccccacatttgttccctgacctgagggtgggggctactatgctgggaaaggccaggtggaagccattggggtgaactctgcctaggaaaattgtcagtcaaaagcaacctgcagccctggagggactgcaaaggtcagtgccgccatcgaggacttggaagatgcagggtggtgacccccactgcagcctcgttccactcgtctaattggcttgtgtggaagacaggggggtcccggagaaagaaggacagtgaatcctggtaaacttaaccaggactccaattgcaactgctgttccagatatgactactgatcactggggcaaatcaaagcatccccggacacctggtctacagccattgatctggtgaaagctttaatttttaatatagattttattttttagagcagtttcatgtttacagagaaattgagcatatttgagagtcctcatatagcatctctccctacacacagtttcccttattattcatatcttgaattactgtgatacatctttgcaattgatgaaccaatattgacctagtcattgatcaggttacatgagggttcactcttcttgttgtacatgctgtgagttcgggcaaatgtgtaatggcatatctccactattacagtgtcacacagaattattttactgcc

SEQ ID NO: 3127 - DNA, 2788 bp, Homo sapiens
caaaaatgaactgaagttaggagaagcctccatatgtttatcctaagtatggtaaactatttaagaaacagttattatttcttactggattgtttgttaattcataaagttaggtcataaagttgttaattctgtattggattgtttgttaattcataaagtaaaaccatacagtgggaatttggaaaaattacctcttattttcttcacaaaataccaattattttgttttatgtaggctccttgaagttcgtggaaggctgtatgagcttctaactcattgtattcctcctgagataataatgaaggctgtatcccagtagaagactcaaaggcacctctgattgtctctccagcatagtaattctggaaaccaagatctgtattttgttctttcccataggccatgtgctctaagggccgagatacaggactggcagtaacagtgggtaccacacatggctaataagagtgcagaggctgagggtatctgaagaagacactgatttttggccaaggtctggtgaatttgcactcgtggctgcagaaatcatcctggcgcaaaacaagctttaaatctttcatttgggggaaacgatcatgaaagtgcctagaaaataagttagcacatgatatgcttctttttttctttttatttacttgacttaaggcaaactgttgtagtaataaggaacattgttttccacttgctcatctccagtctcactttgattgtgtgtggacacactgccctggctctcacaagtagcccattagcagtcacatctttgtgcatctggggcccagactgctgttttctctgctgctaaacaactctatttccttccctaacctctacctcttccccagcatggaatgatggtccctgagtctttatttttgtcatgaattaaggattcttacctgactgtatttgctaactttacaaaatgagagaatagtgaccacctcaagtacatccgagaacaattctccaaattttaagaaagtaagaatatgcaatgtcaattagtggaaaactatacaaattatttgatttatcagaatagattttaaagatgaaaaaggctcagactaattaaaaatgagcaaaagtgtagacactgtactgaagaagaaataaaggtgccaaataaacatataaaaagttccccttcatttatcacttgcatatttcaaattaaaacaacgagatatcactatatacctttagaatagctaaaattaaaacaacagcagcaacaacaacaacaaaaccctgataatactaactgatggcaatgatgtggaacaagaggaactctcattcattgctagtgtaaatgagaagtggtacagccactttggaacacagtttggaagtttcttgtaaagctatacattgtcttaccatataatccagcaatgtaatgctactagatatttacttaactgatttgaaaacttaaaaacctcgtataaatgattatagcaacttcatttataatcacctcaaactgaaagtaaccaagacgtccttcaaaggtgaattgatgaacaaactgtagtatgctcatatagtggaaactattcaagaatgcaaagactgagctatcaaacctgccaaggtatggatgaatcttgaattaatattgctaagtgaaagaagctagtctaaaaaggctacatactatatgattccaattacatgactatatggaagaggcagaactatggagatagtaaacggatgagtggttgctagaagttccataggggaaaggaaaagagttgagtacatgagcataaagaatttttttagactggtaaaactattccatataatattctaatggtagatacttgccataatgtatttgtcaaaacccatagaactttacagcaaaaaagtaatttatgcaaatctttaaatatctcttaagaggtctggaaatcccaggattgaatatagaatgtggcaaaattatcccaccatattacaaatgtacgaaacaagctcactgatgggcataggagtaaaggtgctgacctaagtaactttgacaatgagtggaatctatgagactaaaggctgaaagaagcacacagaagcactgcactgtggctgataaagttgctgcccaacaggtatgtggattaatgattctgaaacccctatacatgtatactagaattgaacaaaaactaaattaatttaatgtatatgcatgtagaattacaaatatattttcttgctctgtcagcagagggggcctagaagcaatgatattctgggagcagagagcctacctagcccccagattttggtttctgataattattctctaataaaatgaaccaaggttctttggagaagcgactgattgtagaatgaggacaggaaatattcgagatgaacttggagtaatttgtgctgcaagaaaataagaaagtgccaaaaagtagttgaaaaccccacaatgatggggtataccaaagaacgtaggaagtaactgaaagggttcccagtgaaagaagcattggattataaacatatgaaataaaaattcacaaactcatactgatatagaaaattatggaatacaaactatccatctgggaacagatatacacaatggaatattaaaatgaagtcctgtaacttgtagcaacataaatggaactggaagtcattatgttaagtgaaataagccaggtacaaacaaatatggcacgttctcattcatatgtggaagtggatctcatggaagcagagggtagaatgggg

SEQ ID NO: 3128 - DNA, 3507 bp, Homo sapiens
cctcgtcccaggctgcaacggaggcagagccaacgcctcgcgggcttccacgtacgcactccaacgcgtgttcccggagaagaacgcatccgggtcacgggagccggtgtctcaggctccgccccttcaccccccgaaaggctaatccccacttccgaccctctcaggccttttccgcttctcttttacctccccaggtccgcccgtctgcgcccctcacaggaagccggagggtcgctctgatcccgaatctcccacaggcgtgaacctgctctgctgctcgcactgctgctactggtgcctggacccggcggcgcctctgagatcaccttcgagcttcctgacaacgccaagcagtgcttctacgaggacatcgctcagggcaccaagtgcaccctggagttccaggtgattactggtggtcactatgatgtagattgtcgattagaagatcctgatggtaaagtgttatacaaagagatgaagaaacagtatgatagttttaccttcacagcctccaaaaatgggacatacaaattttgcttcagcaatgaattttctactttcacacataaaactgtatattttgattttcaagttggagaagacccacctttgtttcctagtgagaaccgagtcagtgctcttacccagatggaatctgcctgtgtttcaattcacgaagctctgaagtctgtcatcgattatcagactcatttccgtttaagagaagctcaaggccgaagccgagcagaggatctaaatacaagagtggcctattggtcagtaggagaagccctcattcttctggtggttagcatagggcaggtatttcttttgaaaagctttttctcagataaaagaaccaccacaactcgtgttggatcataactacgttttgagaattgatgcaccattgccactgtaatattgctgtcctctaattaattttaggtactgaagaacttaatattggcaacatttttaaatccttactcatacacttgttgggagggatgtacaatgcatattcccaaactgtggaaaggacacctttttttatttgtaaaggtggaaaaactttggaactcattttgggctattcatgttaaatattcaacaccaatgatctactctgttcgcagttgtttatatctactcttcgcacactaaactttggtattttgattccttttaaccatttaagactacttttcttataggtagttgatattttaaaaactttagatttaatgtctacatgtgttagggaggaagaaaattgccttttaattgttaataagaaaaccaaatgtgatgaactgtagcccaagccctattctgcactgttcagttttatggaggaaaaataaatctaccataggaatgttagttaatattgatatatcatggtaaaattgatttctcactagcttagaaaatgtcagacttttgtttttggggtttataatttaaaccagctatgctattttttcataaaggcatttgtagtacacagaaaacagtagtttcagtagtgtaaaagagtttatacaggccttaaatatcagactttgtaacaggtagaaatattacagaataatttaagacactacaatgggggcaaatgaaataggaaaatttttagtgagttacacgtactcattacattttcagtgcttttacaaggaaaaaaggtgatatgtttaattttaaaattttaattggctagctcttgcccttatatgactttaatgtctgtgagtcattcccagcttaaattaacaattgttagtattagtctcacacataagtgccatacattttatcctcatggatgtgatgcactgaaaagttagttgctctccttttttcttttttttgtcgtgcatattttatttctgtagtttctggttagctaccctaaagtgatttaaaaatttagaatgctttgtgtttcctatttggtaatcttcattgacttttctttagttaatgagtattaaatagtgcatattctgtagactatagggtttacattgtgttgcatcttataacttgtatagattgagctgattgaaataagattttgttccaagtattatctgatagaatacaagatgattcaaaattatatagatatttaaagcttttctgctgttttttttttttttaattgcaactgcttttctgccgtgcctctcttccctacccaaaagtgatgagttctgaacaagacaagactgtcatattgtagagactttggtatgtgataccatagaatactgattggatagccatcctagtcacttaccaatactgactagaagttaactcttaattctaagctatcttaaaatgcatatatatacttcttgcatggaagagcaaaacaaattcaagttgtcatgcctgataatttcagatgccaccgtatagcaaagggtgaacatgttttcaaccctttaactttttacggtgtttgaagaccagctactccttaatatttatcaatggattaagaagtttaagattttgcagatttatcaatttgggtttttgtactgaagttgtcttgcggctttgcaagtgtccctttatatttaaatttgaaagttgtaagcactgatgttaatgtgattgatcagcatgggcatatgtaaaatgtccttttctggttgcctctctatgctattgtgttcagatacttacaccataattaaacagtaagttatagacttgctgagtttggcatagatagtgcactcatttaatctgtgcctctcaaaacttcagaatattagcatattaccacaaataatttttggtgaaactattgagatattaaaatttttgaaatcactactgttacctgttatagaaaatagtgttggcttagtctagtctctgtgtaactggttacattttgatggttgtctatactcaactggatatgtgtatgtaaattagaaaatacatacctatccagacataaatgctaagtaacatttttttcttcctccaactacataatttgtagctcatcatttttccttaatcctttcctaacttgttgcagcagtttgaatttcccagatatttatgtttgaacataatggctcagaatacatatttgaacatcatagttgtatatatttttaaagtagaataaataatggaaagcaacttgatatacaagtttatactaaaatttcaactgtgtgaagatacattttaaggcattactttgctaataatctacacattcttttttctattaaataaacaaatggtttgtggttcacagctttcatccaagcttggtgataatcaattttgaaaatacagtggactgaaaagcaaatttattctttcgaagatttcatttaaatctctgtactatgcatttttgtttcagtttgtaaatgtgtaacatttatagttaaataggacaaagcaggccctatgactattgttttcaaaaaattaatatataaataattcaga

SEQ ID NO: 3129 - DNA, 1941 bp, Homo sapiens
ttttagtttgcctattatctagccagtttttaaatatatgtacagatggttcttgatttatgtgattcaacttataattttttgactttatgatggatttatcaggatgtaaacctatcataagtcaaggagcatctgagtatcccatgtatattcatgctttattacacaatgatctgattatttgtcagcacatttttaaattctctaatgaaatgtgtggcttttgtttatagactgtggcagggtataccattcctccaggacatcaggataacccagcatcaggggaaaagtttgcctatgtgccatttggagctgggcgtcatcgttgtattggggaaaattttgcctatgttcaaattaagacaatttggtccactatgcttcgtttatatgaatttgatctcattgatggatactttcccactgtgaattatacaactatgattcacacccctgaaaacccagttatccgttacaaacgaagatcaaaatgaaaaaggttgcaaggaacgaatatatgtgattatcactgtaagccacaaaggcattcgaagagaatgaagtgtacaaaacaactcttgtagtttactgtttttttaagtgtgtaattctaaaagccagtttatgatttaggattttgttaactgaatggttctatcaaatataatagcatttgaaacattttctaatagttatgatacttatacatgtgctttcaggaagttccttggtgaaacaattgttgaggggggatctaggtaattggcagattctaaataatataatttccagatagtaattttaagagtactcatcgctcttgccaaataagttcagggtattcaaatcttggactagtcctgcaaggtataaagaataaaaatcccagtgagatacttggaaaccacagtttattattatttatctgggcaattattgtgtgtgtgaggatggaagggtagggaataatcgaacatctaaagccttgaataagagaatactaattgttttggtatgatgatactcagaaatggagatattataggaaaaagaaatcctttggaattttaactaaaatcactgcatatgggaaattaagagatccaggaccatatttgataagagttcctaaaaataatgtaattattaatgctaaagactgctcatgtatcttgatctaattactaaataattacatatttatttacctgataaatatgtatctagttctacaaggtcacatttatgtggaagtccaaagtcaagtccttaggggataattttgttttggctcagttgttccctgcttcctttttttttttttttttttgagatggagtctcgctctgttgcccaggctggagtgcagtggtgcgatctcagctcactgcatcctctgcctcccgggttcaagcaattctctgcctcagcctcccaagtagttgggattacaggcacctgccaccatgcctggctaattttttgtatttttagtagagacgggggtttcactatgttggctaggctggtcttgaactcctgacctcgtgatccacccgccttggcctcccaaagtgctgggattacaggcatgagccaccgcacctggccttccctgcttcctctctagaatccaattagggatgtttgttactactcatattgattaaaacagttaacaaacttttttctttttaaaatgtgagatcagtgaactctggttttaagataatctgaaacaaggtccttgggagtaataaaattggtcacattctgtaaagcacattctgtttaggaatcaacttatctcaaattgtaactcggggcctaactatatgagatggctgaaaaaataccacatcgtctgttttcactaggtgatgccaaaatattttgctttatgtatattacagttctttttaaaacactggaaga

SEQ ID NO: 3130 - DNA, 1269 bp, Homo sapiens
aagagtttggagatgaaggttaatggactgatggtgatggaaaagatagctcagagatatttcaagcaggctgcaagaatctcccaatttcgtccatcacaaatccatcgttgatcctggatgcaggcttcagctggcaaaggaaaggaaatacagagttcaaagcaagttttattgttaagattacatagcatccttcggttctccaatttgactctgggaagctctgttcccaagctaccaagtgtctgagactacacctacttgctcaatagcttatcatgactaatgaccatggatgatgtccctgaagacaagagtccacagatacacattttggatatgccacctagagatgatgtaagtgttgtcaagtttcctttcctggattttatgttcttcaggatgagaaacagaagtacataatttggcaaaaagaaaagtgattctccttttgcctaagaggcaaatgttttagtgatgtgcacaatgaaaacactacaaattccaactgtgacagagatggagttgagatgttgttgatcacagcaggaaatgtcatcataagaattttgtaaatgaagatttaataagttcatgtggatagaccacttagaacactgccttccacagagcagatccgaggtaagtgtttattattaataagtgaaagaatatttcaggttttaccaaaactataattaaaagcattttaccagcctagggattcaaatttaaaatctctccttgttacagtaattttatgcctttgtagcttagtttgtatttccttgcatgtgaaataaatattttattaaattggatgttcacattaaccaaataagtcgaagtataactaaccgtcagtaatttactcttgtgaaggtcaccacatgatttatcactttggacgttttgtgagttttgaaggtagacttgcaataatgcacacagcactagtgcaaaacatagacaactttgctccattaatcatctcactgggaagaaaataagagctggtgtgtggttcttaataaccacaaagccaaatgcaataagtctggttacccagatgtagctgatctgttcaatttatttcaccacatttagctcctgacctaattggagtcagttctggaatattgtgcaatgccttaggaagtccaggttggggagtgctggtcgcatagtacacaccatctactgctttgcattttgtttctaggatttctggaattcagtgtatttgagtactgccaaagtgtgtcc

SEQ ID NO: 3131 - DNA, 3191 bp, Homo sapiens
ttcagcttctcacttctgccaatgctttctctaagtatttatttttcatttctatgcatgatgagaaagaagatgaaaagagcttagggttccaatgaaatgttcgcagagatgcagggcaatacacaggaaacacacagggactgtgttatgcacttcagatgaggaatacaaaatacaaaattccttataagttgtggaataaaagatgcaagacaaaacaagcagtgccgaagacacacggaccacattaatcagaaagaagcagggtgctaaatgaagaggccaagagatcctcttgggatatctgggattatttcacagagaagaaacctaaattcttaacctagattctcaaagtatgaggagtaagcaagcagatactgcgagtagagatgacaccaatgaaaacacaatggacatgagaaaataagggcactgcaaacacaattacacacccaaagcctaattttcaactaaggaaacttgagtcccagactgcccagcattgtaaaatgtacgaagagatttaggttttattcttcagcagacaaaatgcactgactttttttgtttgtttgtttaattgaggagtggtatgattccataacggatttaaaagagtaaatgtgttaggactgggagattgattggcatgggaagatgatagcaaggagaccaggctattagaggagtagggcaaacacactctgatctgatctgagaccatggccattttctttcaaaaatgtttttggaaatattttatggttattatttttaaataaaatagctcctactcttgatttcactacaaatgttaaaatattgctatcacttataagacaaaaccataggctaatgtataatgcttgtaatagagcatacttggtaaatacaaaggcacagctgctttaattaatttctatgagaaaagtaaacaaaaattttgaatacttcatgcaaagtataacaagcttataggcttttacattttccagttcacattgccatttctatctaagaaggacacacaataagatggaagaaaacttgctttaaaatctttattttaagcagggacttaatgcagtgattttattctcctaataaatataaccccacataagagctgtcaccatattctgtaataggcaccaagtttgagccaaactaattagcaataaatctgccagaacccactcaaaatattctcctaattaatcagaaaagaaatagatgaattgaaaaatgttgttatcccatgaaagaaattttatcatcaatttctgtggttacttaactgatttgtctgtcttcatactggcacgcccatcagcctttgctttataagtcagttaaaaattttctgattacttgggatgaagggattataaaaagctataagtaccaagtgatcatgatttttagctggattatatttatttgtttgagcacacttcactaataaaatatttttcctgtatttcatatactaaaatagttacctccacttttttaaaatctttagctgatttctgtttttaaaaccctcatttactttttactgttttggttcttctgtgtaataattttttttcatctcttcctcaacagtttccattgaatgttttcagaatactttcatctaaattttaaatgtctcttgagtgtagctaattaagcttcattaaagcataacaatctaaatcttaacaccaataatgagcacttaataaaacaaagacaaccttccatttgaagattaacaaatttgctctatatgttcttttccaggctaaggaaacagtctgccatctgatataaattttaccttaatatttgtacctttattactttattccatgcttttaaatggttagaacatcatgggcttcttccaaaatttctgaaggaaaaatattttaaagttctcattagtcttcaaaagcataaagtatggaaaggtgggaagggtagggagagatgtgactttacagcagagaaacgtgccaaacactacctcaacttcatggtaaagactaacatcatcagtgaaaatcatttcaattgtgtttatctttgatattaagtgttaagaatggtacttatctttgtattcattatccgcaaatccccatagccccaatctaaacctggaaacaaaaaatcagacaaatccaaactgatactctacaaaatacctggccagcactcctgaaatatgtgaaagtcatcacatactttgatgattttcacatatttcttacactgagaaactttgcaagaggaaggtagtacatatgataattaatgtaatgaggtatcctggatgggatcctggaacagaaagaaaaaaaatttggaaagttcaagtgaagtacagagtttggttaatggcaatgttaccaacattggtttcttagttttgacaaatgcaccatggcaatgtaagatgttaactggatgaaagttactcagaaactttctgtaccatctctgcaaatattctggaaacctaaaacaattctattttttgaaagtttattcacaaataatttcataagaacagataatcaatatcacaaggtaattgtgaaaacaggcaaaatagtcttatgtctattcctgataaattatgtattgattattaatagaacttccacatgcattttatgctataaaatattttgtacagtagatttatgcctcatgagttaagttgtaatccaatggcaaggggaacattttgtcaaagtttctcttgacagtacattaaactacccataaaatatggaacatattgtcttatgtatacaacatcctacagagttcttgtaaatccttcatagtgtttctccatggtatctttcctaataaatataatccttcaatgtaattttcaaatggcataaaggaagtttccatcttccaaccacttgcacaaacaatgtgattcatttctttctaaatgatctggaaactctttgcagaatgtctgctctctttccaaaggcatcaaaatatggacttattacttaagattccattgaatttactctcagaggcacatgctcattgagaaaaatgctgaatcatcacctctcacttattattatggttctttatttccagaggttcaattgagttctaacaggtatacatgtgactccattgtatttcaaaatggt

SEQ ID NO: 3132 - DNA, 716 bp, Homo sapiens
gctagcgctccgcgggactgggaactctgcagccggtcccggtgtgattgctgccgccttgggagcagcctccgccgcggccgccgagttccaatggcccattggaaccttttgctaggttttggacgcttagcagaactttgacatcgctggaggcgtggagccctgttgcactcgaataatggcctctctttgagatgattcacgtctagggaacactggaaaatgctggattcacagtgcccctttgccttcgaaaaacttttacattggctttaagtactttatttggaggatgattctgtgatcttatctacactgttcacaaggcagcacttacacaggcccagaaccatggtcatgtaggattctttcctggggaaacaaagtaaataaactgacttttaggtgtatctgtaggatggattttttacaaacttaagaattatgtttaggaagattaatgactggggaatacaaaaggaagtggcaacagtgggagtccttgtattgtagactgaattatcctccaaaaagatatattgaagtcctaaaccttggtatctgtgaatgtgaccttatttggactgcctttgcagacgtaatcaagttaagatgaaatcatactggagtagggtttgccctactctaatatgacttgtgtcctcataaaaagggaacagacacagacacacgcacagagaacaccatatgag

SEQ ID NO: 3133 - DNA, 4937 bp, Homo sapiens
agagcggcgagcccctccgcggctcggggtgagtcgggcgcggggcgcagaccgcgctctgacgtcgggggcggagcggccgtgacgcgcgggggcgggtctgcgcaccttcccggcccagccggcgattcattcaaaaggcgcgcaggctgcgcggctgtccgggcgctcgccgagccgggccgcggcgccgagtcgaacggggagccgagctggagctgccgcggcgcagccagattcccaccagggcgaacccagcaccgcctgtataccagactctgtgccaggcactgaacgtaaataaaaggtttgtgcccttctcctccacattccacacgtagggaaactgagtcacagtgaagtgtggggaatgcttactctgtgccaggcctgtgctgagtacttaatgtgattctcttctttcagccttaccacagccctctgcaggcaggccacagagccagtgcaagacagagcagagcaggactgcaccccatactttgtatccccaggttagcccaggggttcagatctgggttctgacccaccccagcctctgggctccttccccctcagcctgctcactggctcttctagctcggcatagctgggctctctaccaagagtgccttttctgccttctcccccaaatcagcccatacccgcccaggtcggcactgggcatggagcaggcagctcgtggtggggaaagggctgggtaataggatctgcatggcaccatgaatgctgagggggaggtgggggagagggtacttccaggaggaagtgacttcgagctgagctctaaggaagagtgggtgctggccaagcgatgaggggagagcagaaagcaggtgcagcgtgtgtgagggtggaaagcactcagcgtggcaggcgtgtgggtgggggaggttggtgggggcgcgtcacgacgccatcctgagggtggtgggagctggcccagggccagggccagaactgggtgtcagggcacctaggctgcagggcgggactgacctggaggccagagacagggcaagggggcaagagcaatgggcgcaggccttgggagagcttagggactgtagggaaggggagggccctgcctaggggagggggagtggcgtggcagggcccgggtgaccccagcgagcttcagttctgggaaaggggaagctgcctgtggcctgggctggtggcacagcttcctctttctctgaggcctccaggctgcacctccctggggctccaccatctgtggcctcaatcgtggtctggggccctcagcttgggggtctggccgtggcctttgctagttggcttttctccagggaatttctggttctcattgttcgggcatttttttggagagctgagtctgaggaaaccctccccgcctcgtgagcctgcttggaggcctcccgcttcagacatggggctgggtgtggagttttgtggcaaataaaacagacgtccctgccctcaccactgtctggtgggggagcaaggaataaacaagtaagcaaacaaatacttaatcacagccctctgccagcagggcagaggagaagggctgtggagaaggaaatcccatgacctactttagcttcattacctcctttaaaccccatgactggctgggcacagcggctcacacctggaatcccagtactttgggaggccaaggcgagaggatcgcttgagcccaagagttggagaccagccagggcaacataatgagaccccgtctctacagaaaataaatttaaaaatttagccaggcatggtggggcatgcctgcagtcctagttactcaggaggctgaagcaggaggatcacttaaaagttcaaagttgcagtgagctgtgatcgtgctactgcagtccatcctggatggcagagtgagacactgtctcagaaaaaacaaaacagaaattccccaaaaacttcgcgacagccatgccagcaagatgaacgtccccatctctgtagatgagaaaactgagacccagtgatgtgaaggtcccaaagggagttggtggcagtggagactgggccccaggctaggagacatgggaggagtggcctctaagccaagttccttctctgctacccccctggggcccctcctccccatccagtgtggctgggtgtggctctcctctgtcaggcatcggaggctctggggcctcactgactgcccagcctttaggatgaggcagagacggatatgggaccttcagatatcccctcccagccgagggggcttccatctaactgtttttttggtcacggttccagggccgttttagacagtggaggccttgtggggcagggtgtgaggggtgctgagcagcaggtgtggacatgtgtgtgcaccaggcctttctacctgaccgggcaagtccagtgggggctcagtctgggctgagtgtgggggccgggcagccagactggagtaagtgctggtttggggtaatgagaaggtgcgtaattagaaggtgcaaggccctaggtggcagtgtctatgcgtgtgctggagtgggccctcgttggctttgagtctgggcctttggaccccgctttcttcctggaaggttctagatcacacagctctgcgtctgtctgcagatgagcagctgcacagctgctccctgtgggctcaggtcacctagcaggtgccacccagggttggggtggttctagggctctctgctgtggttgcttggcctcttttcacccccgcatcagccctctgggcctaccttggggacatggagggctgctagagctgggggctgggctgttgggttggtcacggttccccctggctttgtcttttttttttttttttgagatggagtcttgctctgtcgcccaggctggagtacagtggcacaatctcggctcactgcaacctccacctcccaggttcaagcgattcccctgcctcagcctcccgagtagctgggattacaagttgtaccaccacactgggctaatttttgtatttttactagagacggggtttcagcatcttggccaggctggtcttgaactcctgacctcgtgatccacctgcctctgcctcccaaagtgctgggattacaggcgtgagccaccatgcctgccacagcctgcccccacccccagcatcaggctctgtcttgcgtagtcaggcctagtggggaagtgaagcctgaggacttggggctcgtggtcaggtctgtgggttagatccctcaaaggacagaggaggggccatggggagacaggctcgaggtgggagctgggccctgacaagggcacaggacactttggggcagaaactggaaggaagacttgtgaccaaatttaaggagtgacaggggaccctccccaaatagcctgggggtgccatctgttgggtgttgactgccaggtgtggcctccaccctatactgtggccctaccttctcctgtccctggctttcccctgagctggcctgggacccagagtggctgccagtgacctggagagtcctgagatgatgtaactgctgcccactccctcccctgagtgtaactcaaaccctgggcccctctgagatctgccaagagggagggcgggtggacagatcggtttcctgggctgctattctaggtgggagggccgggctgcctgcagggagaggactctgagtgatttgggactaccacaggaggcgcttttctcacctcaccggccttggagtcacagcgggggcctcagccgcggcggccctgagccagtggctgggttcccaggctgcccctgggcttaagaggctgcgtgtggcctgaagagcacggctttcctcagcctcgtgcccctgaagccaggcctccaggaagtacacagcggacttccttgctctgccacctgtcccttctgctgtctgatgtgaatcctttgtcctgctgtgtccgcctcgtccactggccggaggcttctccagagcaggccaccgtctgggcctgggggcctcagtctcagaccggtgggccgtgacgccaccatggatatttctctgaagtatcacacactgcactcccactctgctttatttcgtttcttggcacttaccaccaaatggcaggggcacctctctgtttgcagttgggtctcccctgggatggagctccctgcagacagggaccttgtctgtcttgttcataccgatttctccagtgcccgcacgcagtaggtgctggagagatgacaaagacagagcactggctgccgtgaccaccccagccccataggtctgccaggggaagagctgtggccagacatgttccagcctcaagggaggagtcagcctccctggaagaggtgtggacagtggccatgcagaaggaccaggacctagatggggtggggagctgtgggagccagacccactttggggaaagcttctagagaagcttctggaaagagaggccttcgtgttgagctttgaagggtaaaggaaaaggccttccttggaccagaaccagcaggagtgaaggcagaggccgggcatgcttgcagacctgtgaggaggaggcggggggagcctgagcctggagcgctgggctggagtgtggaggccgggctggggtgttgggtgttggttgcaaccctgtcatcacggacacaggccgccacacgcgcttccttcccctgctgatgcctcggggcacctggcagtttaaggaaggggaaggaagcccttcctcctctgggaagcctcccagcctgcagagccttcttcctgccttcctgcctgtgctgccccgtgaggccggctcccaggcagggcagccccctctgcttgggcctgtgcttgcgggtgtggagccggcctccccgggctctgcctgcccagcagcaccttgcctgctccccatgagtcctgtcatcctggaagtggtgc

SEQ ID NO: 3134 - DNA, 36726 bp, Homo sapiens
ggctcactggcttcttagcagtagctttgctgggagctgcggtattccaacagcccctagtgtcggctgggatgatgtgacttgggggttaaatgcagtttgcagtttcaaaaaagaaaagcatgatttgttgaaagaggctcctgaagaagaacatctgcgaagaagtctatctcccatatggcttttaggacactttgcagtatgctcagatcaagcaatatggacctgaaaaggaaaagaaaaaaaaaagaaagcaaccagtctccttcatatgaaaatctctgtggcattctgggacataattccatacctgtatatacagatctgccttgctctctttggtggcttcagaatacttcattgcaagtgtcccctaactttttgaaccagtcttctaccaatggatatttaggttgtttctaatcttcagcaattaaaacagtgatgaaaggaatatccttttatcatctttacatatataaactcagatccctctactttccaagtgtgagaagattttgttctacagtcgcttctgtgagatcaccacagccctggcaaaccaagagggaggaaccttgtgcctttgaagtgtgattcacagtgcttgataaagtgccagtattctctaaacatcatgataaatgtttccaagaccactctgctagattgcttgtagcttaccttccagctcctgccctttctggttgctagagacagttttaggttcacagcaaattggatggaagttacagaaattcttctatttttaattttaaactaacatacgacaaaaggatttcctgatttatccaccatttcaaaaaaaggtccgaagaaaatgaaggagcctcttcctgtactcatggtacataaggtaacagaaaccacagaaatcaaaaccgtggataagaggagactacagaaagatttctccttctggagtacatgaatcaaattgcattgaatcaaaagttttgtgaagatttgagatgagaatgagagccaaataagccatatcataagaagctgtgatcagaaataaaatgaggacaatgcttactgtggctttcaaggcaggagaaagcacacccgagggggtcgtgtcccacactaggcagatctaatggtgccacaaaagacaggtgttttgtcagatttcagccacacactttcacacctgcaacgcattaactaccgcagcaatgttaatgaagaccaggtgcctgttctccagcataaatgaggaactggcaggagatttgctgtttgctacctgacgtctacccctgagtctctgaaccccgtccttctggttgaaggggaagatcaaagagtattttgaagaaaaagatgtacagggaatttgcttgatgctaccaacaaaaaacgtgtagtgatgtacaaaaaatgattcctgttggacattcaacacgatactccaatgtactttgaacacgtcatgttctgtgaaggtaaaaatgggcagtgactgctgtctctgtgtacttcggaacatttctttctgagcctataaagtgtttggctggcatgcaggggcctgaggaagcttaaggagaaacctcgtcccatgacacataatcctaccacaccctgaaatggatagatggttgggtcatgccagtgtgcacacacagactggtaagtggaagattagccagaattgtgaaagatgctaccatacagccacccagttctgccaaaggagaaggtcacttgccaacggcaaatgtaaatggccatgaatatcctgttctctttctgtcaaagttggttctgagcactgaggggagagacagaattaaaagtagacacagcagcgagtaaagctatctctgtctaatggagtgtctgtatttttgggtacatgatttttctatacctgagatgaataattcattctcaaggaaccccaaagcaaaagtttaaagatgattaaaaaataactttggcttctgatcttctgataactgggaactctgtgatagagacatagaaaactattaggaattaaaaccaaaacaagaccgggctttagggattcccctcacactattatactgtcatggaaggctcaggataaccaggctagccgtacataaagtaattaataaagtaggtcaattacaaagctagaagagttttatttagcgtgatattgatcacatcttgaatcatctccctgaatctccgtatttttcttttttattaaaaacagaatagcgttcttgaagaattgttttatctacacttctgtaattgttctctaaacagagaattgtttagaaggaccagttccctagcaatatatgacctttctaactatacttcatgtcatctcatgcaggccctatcttctgtaaaattaggcctccattgtgtttctcactcaagattcttctttattatttcccagattctctggatggagcattttctttataaacaacatatttgtgctcatctgttgtggatgctcttggtgccccatccagacctcctttaccaggctgatgcacgaacactctagcttctaagaatgttcactgttagcttatagattctccttttctacagagtcacccttggctaagtaggagccactatatcctttagtatacattaccagcttatagccattgattaagggaagacaaaagtcagcccttgtctcaaggtagggccaattctgaagtgaaattcatgctccagagctccctgtggggccaggctacagttagtttctagctgggccacatgcatgcttagcttgttttgccttatcctgctgccctcacttctcttcccctgagaacactaacacaagagtccctgtccaggccctgcttcaagggaacctgccaatcatcatgactgtgaacatttagggcaggtgggtaggagtctgagagtggtaatgggattggagggggtttagcacataatttaccctaataagtgtttgctaaatgagtggattttccaggcttgatgcttggattaaaagtagcacagctgtcttcaaaagatctatttctcaagcagggctgggctccctgattcactcctggattggaaacaaaataagtgggaaaatttcataaggcttattgtcgaatagaaagacattgatgattgttaatgatgttaattaatcaacagggattattaagtgccagcttttcccagcatgtgactaaacacccaggtctgtggtaactgtgatgaagaaaataacctcttttatcttataaaaaaaaaatcttatcttcatgtggagataaaacttactcaaatgaaacaatgaaaatataagactgtgttcacatgacaaaatgtacttcataggtaataagttccaaaggaaattcagagaagtaagaaatcaatgtgggcgtttgtgagttaggcaagtcttggaggaataggtgtgtgtgggagggacaggagagaagacattccaagtgggagaagaggtaagaagaaaggtgtggagacagtaatgaggatactactatttgccaggagatataacatgagaaaataagttccccctgagttcacttcctttttatatttccatcccattatcctatttccatttattcttcattcatttattaattcagtaatcaaatattctttgagacctacactgttccaagaactgcattatgtcttagggatatgggaatgaaaagaatacccatcattgttctcaaggaactgacagtctccagagagataaaattagcaaacagacaattacaatacagggttgtcatggtactttaagagtaagcatagggtgctaggagagaacaaaggagaggcatggaagccagacttgggggaaggtccaaaaaggcttcctgaagaagtgacatcttattggagacataaagagtgggtagaatttagccaggtgaaggagagtgcaagaaaataattgtggggatgcatggtgctttgaggaaagtgaggggtgcagtatcactgatgtgtgtggaggacagaaagaccaagggtggacaataaacgggccagatcagggaccaccctgtaattaaaggagtatggactgcatctttagggccatgataaccattagttgactaaagtattaaaattacttgatcggattatttctgaaacattactttagttggagtagtttgaataggttggtctcgaccaaactggatgctgatagacatgctaagaagctttgttatgcacatggcaaatgatggtgggaatggagagaagtgaaggtaaagtgacataaattggagtttcattggttttgggagaagagaataaaaaagtcgagaataatactgaagaatttacattaagcaactagggtggggagtaatggtatcttcatcaagttagggagcatgagaggaagagtgagattggggaacagatgattactcagtttttgacgtgatagttttgagaatcctggggataatcaagcagagatgttgaataggtgggtctggaagttagaagacacttttggggtggcaatatagatttggggtttctactaataaaccactcactttacttccatcctattttgtttagtggtaccaacaccctcttatttgctcaggttagaaactcatatttccctaaggggtccatggatgggcttcataggattcttgaacctccttgaaattgcatgcacaattttgggtataagtgaataagtgcctttttctagtaccatgagatgtagaattttatggaatttgcaaaaggttacttgacttccctcttgtccccccaaaacaaagagaatccaaagtgacttggggtctttgtctcttttcctctcttctttatatttactcatgcgtcgtgttcttcagtcttatctttgaagtcatatttatatcccttatctttcctcattgctagcctcctagttcagatccttactgcttgtaactttaagaacttacattggaatccctcaactttctaatacatgtaactgcatattttttttctccaaactgctaccaactatattagttgagttcccacctttatgggcagcaagaaaatttaactttgtcagcccctcctggtaatcatcagcttagtttactgattttttgcaatccagttattaaaatctcagactctattcaaaacatcttatctttaattaaattagatatgactaggctgctagaagctgattgaggaggagtagagtgtaattggttctttacctcttttcttctgatctcaggcaactgttctgctgatgggggtatcagagaggtcagggtgactgaaaagaattcactcatgtgattgccagcatgttgaagatggcaagctggcaatcttttctttaaagtcagccaatacctggtctaatttctgggtggtggtaaccagcctccagttacacagcattacatcttaggtggtctttgatgcccagccagcagtcttatggaggtagaacagcttccttctctccctcctggtgggtggctctcagtatcctcctcacatcaacccatcattcatcaatatggcccacccatagtggtgcccaccccttatttggtgacctgggctaggtccacagaaaacttgggatcattggtacacctgcctcaatttgtatgagactgtgagggggtagcaaccttaatgtactaggacttactcatttactctctcttaggattcaacacccaaaatattctatgcattttcttgggactgttaactttcaggtgcagcaaaggttcataacaatcttcacttcctaatgatgctttcagatttcatgagtgattctccagggaacatctggcttggttgggcacagataaatagccaaactgcttccctctcagccccgttccacatggagagaagtaaatactgattcacaaactcacctcttcccaaaagatgactcctcttcccctctctgtttccttcaggggggctgctctactgattcttctgaaaggtcaccttgttagcaggtccccagtcagggatgtatggccttgttgtttttcagctttgaggtgcctctacttggtaactccctaggaaggagtctcagtatgtatcacaacttcatgttaccatcttttaactggtaaccatgatacaatttcttgtctctctcacatatttttcctaaatgttttaacttcgatgactccccaaggttgagacaaataccttcagactggcctccacagtcctttaaaattgtggcctccaagtacctttgcaatctcaattcttaccataagctctttgaataatatgggcaataatcaaacagatcctgccctatcaatgttccatgatgttggtcatgcctttccctttgcctgcaacatcccttctttaatttttattgaaaattcttctattcattgtttaggtcaacctcccatgtcatctccataatgtcttaccattctttcaacaggaatcaatcctgtctatgccatttgcagcatgcttttacttgtctgattctttgacatcataagaaacagtgaagtggcctagccaggtgccttaaacatagcaaatgttcaacagttcagtcagactgaaatgacaggggaagtgcagtcagatcatgtgaggagtcttaaatgactaaatgaccttggatactatttcagttgatttctattaaagacttgggaaagccaactttcactgatttttgcaatttatagaaatgctcccattgcaatagcttgtgagcatattgccaaaaaactataacaaaaaattcaactcacgaattgtgcctgtcttcctgatagggtgctctatgcttgttagtatctagaggacaaatgaaaaccatgtgctctggatctaaaacacaatcaacaagtggggacatggaatctaaaagaagatcaagtgtgggtgtcccccagaattaacaccatgcttgataccaggactcaaattgggcaggagtcagggtcagggtgggagggtaaagtgggtgttgtcgctagtttcagctgtggagtggtgaggaagcagaaaataaggtaaccaggaccaaattctggtagggggcaattaagttcagatggatgtctattggtggcttgagcatccaacattatacagccatgtggctggtgtcatcaggcatctgagcaactgtgctctaacaagtggtgtttctggataaacttaatcttcaatggtgagtttaggcagagggcttcaaagagggctcaggaacctctgagcaacacccgaagtctttggctacactaaaaagccctgatttatataaataaaggcttagatgttctttaaacagctcacttgacatgcctgaaccttataaacaatgagactaacgtaaatgtatggtgctctagaaatatttggaagatcatcttgacatacctaaattcaacttggcttgctaatttttaagagccagatctaataccgtacgtacattacccattccacaaataatcaaccacatatacctttggccatccccacacccattggatacgcacacagctgtcctcacatgatcttacacccctccaactcatctatacctacaaacagaagcacgtgcctatcaaatgcacacatcttcaccaaaccttgggttcccacaaacttttcttctcctccagcctatcctgagttatgcagctgttttaggccattctctgaccgaccagctatgctctaggtggaacagctgtggttagaaacttggccaggacttgctgccaagagccagttagaggtggttgagtgagcactattgagagtagctgtggaatgtgggtgaagccagaggagagtgggcacagctgatgtcccttctttaagaagacgctcccctccctccccagtgggatgatggagggcagctgtgtgctgatgatgcaaagaaaatgagacggtagcgcttagcttcagaggcagcagctgctgtggtctggagggcaccaccaggtcatccccagagggtaagcactgctccaatgcccttgtgtaatggtaggaagcggctggctcgcccatctctggttagatggcattagcaaagtttgttgagtttctttgagggccagtgtgtgatcatacatgtgtaaggacacacttcctcatacacatttatttgtacacatagacaactggccttggggataattttttttttaagatttctgactcgcaggaaaagctgggagttagcagggattggctaaatgtgtctgattcccttgcacacagcttctccttgcctgtgaagctaatgctttcactctcattgagaagcaagatctctcagttggagagccttgtttaggtcatctcacaccacactcaattttgtcctcttgctccagcttacttattccaggccaaaggagaccagggaagtcagggacctttattattgctgggacccatttgatatttggagccgataaatgagatgtagccaataaacgagtcagcaaaacccagctttggtaattaaataccaattgcagtcccaagctccaaggtcacttacctttaatgtaagagttcctgtttagtgagattattttttaaaagactcaattagctgtaggttactaacactttgaagaccccatcctaggttttttgatgtcttattcttccctacatgaccagtgtccttcaatagtttctctgttaggcagacctccaccaagtggctctatccagaacaatctcccacttgcaatgtcccagagggctaattatcaccaatagtactgttgtgactatagaaagacctgtggctgcagaaagacccaggcttagtaattaaaaaccatctgttcggcatccatttgtttggcactcatctcccaaatttagagcccttagcaccctttccttcattctatcttgcaccccagttgacatgctccctctctgatccagcaatgggattggacacatctttgatttcactcctacttggccatctcctcagcaacagctgccttctcagcttgacttcaatctccatatttgctatggataaatccataaactgaatgcatctgtctctagcagctggaaattatgatctcccactatgtgattcccttcttgcatgggagtttgcatgagaaacagcttaaaaattatttgtattgcagaattaaccctttttttcaatacctcccatcaaaattcttctctcactgtggtatttggagggtaccagttgaatgcacttgaatgtaagaattcatactaaagtataaatgactactaggtggttaatcagatttatggctccctgaaagaattatttcagaggaaagcagcttcattctgaactgagacatgagaagacactttgccaaattctcagtctctacaggatctgccccaacacatacctggtctcctgatattatttttatttgctttcttcttccacataatgcctgcttttccaaggactgagatcataaccctcagtataaccacactctttcactgccttcagggtgaagcctacatttttacttggggcccaaacatagaaattcagtctccctagttgccacccctctgatattcctaacttatcaatgcattagatctttgggaagtgtgatgaggtggactctcttcctctccaacaagcaaacactgcccgattcacattgtcagtgtttgttcatagaaccatgccatttgctcataaatatcaaacttcatgggaaatgtttttcatgggccattttccctttctgcataaactcattattaaagaatataaagaatagttgtttatgctcttttattggtgatcaaggtaattatgataattacaatattttgaacatatctcatttaattatcatcttaaaccctcaagatagtaattatttgccctatatcatggttaaagaaattgaggtttggacatattaaataatttgcctaaagtcatgtagtcagcctgtggttgttctagggttcagatgaaagtctgttccaaattctaatttcaaattctgtgttccttccactgaatctatatggctaaggatgatctcttgtagtgaaatttttctcccctcaaagttgaaggccattttagtgactaatgggaacttttctcttcattcctagtactcctcaagtttataaagtaaggaccttcgggactggcacgacctcattatggctaaccagctagctcccctcagcactgttttttcctgctggtcaccaacacccagtaaatagttgctgattgatctgctgagatacagaaagatggaccagaccaaagcaaatgactttgtaactgatgaggagtgggcagagatgtaccagaaaggtggatgaggctgttggtgcatgtggccagaaatgaaataaagggctgagctgggagataatgaatagactccgttctactgaaagtccagaagtggtaagtcatattgcatgtttaaaatggtaagattcaagagtggtttctttccagacaagaaatgttcaaaccattcaggttttaagtggatccatttactaagttggcctgcttctagcattatatttatccattctgctattattcatttgacaaacactgactgagcaccaaatcagatggaagaaccttctcccatttccttggccttatttctgtcctaggccctcggccacttggttatggagagttctggctcttactagtactgccacggcagcagctgccatgactatctctggggaacacccactttctcagtcttccctggcgagtgctcagctccgacactatgtccatcataccctttgcggtagaagccacacaaacctggaactcaggctcaacttaacaaaattcataagcctcctcttcctcttaccactttgcaacttaaataaagcattctaggctgggcacggtggctcacacctataatcccaggacttggggaggccacggtggggggatcatttgaggtcaggagttcgagaccagcctggccaatgtggtgaaaccccatctctactaaaaataccaaaattagctgggtgtggtggcacatgcctataatcccagctacttgggaggctgggacaggagaatcccttgaacctgggagatggaggttgcggtgacccaagattgtgccactgcactctagcctgggcaacagagggagagactgccttcaaaaatagtaacaataataaagcattctaacacagggtctgccatctggcttccctagtggcttccctgaagtacggggattgagagtaccaggggctgggtaggtaccttcctactggagaactttgatcaatgagagaaaagaggatataaactcctttcttttgttttctccaatccaccattctaaggtgcagggactctgtttagctcatctgaacatatcctttatagctgagcaacagactgtgtctcttgggaagctacagccagcttggtaattgacagccctgactatgaccttatatttgtgtctcctttttccttatttcactttttttcccctctcagccttgttgcccagagattgtacctcccaacaaataattaattatcactaaggtttgccttggcacatccctttggcggctttgccagcagacgcaagcaggtaatgtgaaccagacaccgtgctaggtgtgggacatcaaatggtgaacaagacagatttttgcccgacccttatgcagttttcgacctagtgagagagacaggccatatgctattaaacaacaataaacagaaaaaaaagcacaatttgtgatgagttccataatgaaataaaatttacttctgggaggacatagtggtggaggggttggagaaaatcagtttaaatatggagaattgaagaggtctctgtgaggagtttatacttaagttgaggcatgagccagccatgataacagcagagggaagagaactctcagctgctagagtatacagcacatagcaaagccccaaagcaagaatggggtttgagtgtttggggcacttgtggaagataaggatgattgcagtgtcgtgatcaaagcaaagagtggctgacttgaggttggggaagatgcaagagtcagatcctgcagactttgtaggctattgaatcaggctgaattttattttaagtgccactggaagccaccaaaatactttaagcagagatattacaatagaatccggtggaatgagtctccttaatttattagcataatgccttttacttataaccttaataataaaagaacacaaggattatggctgtaaatacatggaagtaaagtttataacatattttatgtgttaacacaagcacaaatatatatatgtacatgtaccgttaggtacatatactctgtatacgtaagcatgtatatactacatatatacatgaattatatgtgcttatgtatatatagtatatgtacatatatagtgtatatatacatgcttatatatacatatatgtgtatatatacatgcttgtaaccaccactctctcctaaggaatcataatttattatactactaattttatttttttgtccagttagtccagcagtgtttgcttctttggccgctttgctcatgtccattcatgttggtttatttccgtgtattaatttcagaaagtttacagtatttgtggccgcaatttcttgaagtacagagcttcttctttctcaattagagtttcttcattaactgtagttctgttgctatggctgtcattagtgtaatctgctaattcagaaattcacggaagtacggaaatacattttgctaatgtgcattgcaaaaggccctctaaaaaaatgcctcctatataatgtgattttcaaaatgccagctgcagctgccagggaagagcttttatagaccaacctggatttgggtgagagcaatatgtcttctaggcagagaaagctctcctctaccactctataaaggcttttctcgatggttgctacctgtctttgaccctcagatgtttccaaattgcctctctggaggcagctttttagccagctcacttctatttaagcgtgttgtgttaaagagctggcaagattttttagaagagtttcaccaaacaccaattcctgtgaaaatttaaactatatattgatatcacccttgcgcagatcacaccgttgcaggcttggcagtaaacccacatgctatgttttggggagtaacggaattgttaaattaccaaatgtattattttctggccagaaattgcaccatggagattcatcccttttctttggttggaaagctttgtcaattcaggggatcagttagtaatcatttagcatggaatagttcacaaagttgattttcagaagacaattgcctgagatgaaatgggatatggaatagattctgacagaagaggatagacactgtcaggaaacacagcgctaccagggaggtctataaacagagaaccccagggaatgctgggtgcccaggagagatggctgcatcggtgctgaaagcaaagatggttgtgcgccaaattttaacttcagacttttgcctcaggcagcactgttagcacttcaagtcccattaaggaccctctctttagagcagatggtggcttcagtgataacaaagaaaacaacagtggtaggagaaaagatggccagactgagcttcaaagaagcaaaacaccaagggaaaagttattcatgtttcttgtggggaatgaatcactgaaaaaaagtctttaaatggagatgatagaatggaaataatttatttacgagagtcagtattatcatgttcatgataaccttggctcttttcagactttctgcctccgtgtagattggtgaagaaacagagatgtatctgatttgaaacaaaatataagtgttccagattagaacatatttttatattgagtatattctgtgcccaactgggataatttacgtggaggtttgagaaggtctttgtgaggagaggatatttaagttcagcaataaaactaagtaatcaaaataatattttgccttccagtaagaaactttcattccatcagaaaccacgatgtctttggtttagctaattttcagaattaagctaattttgatattgcatatttaagaaaacctaaatttatagaaattaagtcaacagataaaatgaaaattacttgttgcttatatataccatgtgactttatgcatgcagggaagtgtatgtctatacatatgctcacatccatatgtatggacctgattaaagtatgaccttgttgtatatgtgtgtatgtgtgtctctgtatatacacacacacacatatgatcatttggtgccaacaaggtctacttatttcaggtgatctcttatcactggctctgtactccaaatttcacctgtgaatgtggacaagtttaaattagtcaaatttccaagatttcttgtcattcgtgccacatgttggctgttttgactccttctgatttttgaccctctttattgtcttaaccttgctttcatacaaggaactcctcaactcttatttcatatgcatctggcttccatttcatttgtggtttctgggcactacctagccctttatgttgtttgtcaaacatgtctacaccttcctgatcctggctgctcacactgtctccaagaattatcctgaggtgagcacatggaactttctaccttcaggctggtttaataggaatctaaagttaggaaaatgtttggccttttatccctttatttgtggcatctaatagcattctattacctaccatatactgatgacctaatcagatttgctgtgctgattttcatgtatgcaaagattaataaaccatagtgtctaatccccaagggcttagctgcaaatgtagtaggtgagagagacacataaataagtaatttcaacataatacaataagtattgggatagatgttgacacgaagagaggaagcataaagaaaagggaataatgaacttgacttataagtaagggataatacatatcagtttgcccagaaaagtcctaggttatgaccttgcctcagaatctattagagtaagcattagtctcacacttttcactttccaaggtgtcccagttgagaccaaaaaaaaaaaaaaaaaaaaaaaaaaaaaaaaaacatggtgaccctgcttgtattagtcagtgttctccagagagacacaaccaatagggtagatacagatagagatatatgttataaatatatagatatttagatatatagatataacatatataaccatgctaccagcttcagggaagctggtagcacggttccgatctgaaggtctaagaaccaagagggggcactggtgcaagcacccaaatctgagggccgtgggtgtcccagctccagaagagaaaaagtaaattcagctttcctctgcctttttgttctgtcaaggccctcagccaagcagatggtgtccacccacactgggtgagggtggatattgcttaccctgattcagataccagtctcttctggaaacactttcacagacatacccaaaagtaattctttaccagctatctgggtatcccttactaagtcagtcaagttgacacctaaataaaccatcatactatttatagtgaaaaggtcaacgtttgtaagagaatgcaagaaatatgataaaaagtatcagaagaactttgccaatctagtgagacagaagtggaaattactggtggaagaaataggcccagtgacctgagcaatgcgttgatctggagaacgacctatcgttcacgtgactacgtgactgtgcctcgtaggagagggatgagatgctgtgggctgaagaagaaaccaggagccaacaatggtgagctgtctctctctgtaatgtcaagaaccttaactttttcttgtagacaatggaatcacattaaaggttttttttgttttttgttttttttggtttttttgagatggagtttcactctttttgcccaggctggagtgctgcagcctcagcctcccaagtagctgggattataggtgcctgcaaccacacctggctaattttttgtatttttagtagagatggggtttcaccatgttggccaggatggtctcgatctcttgaactcgtgatcggtctgccttggcctcccaaagtgctgggattacaggcataagccaccgtgcccggcccacattaaagtttttaactgaaaatatgacctaattagatttgtactttagtatttctatgtggtatacatagaaataatgtacagaatagatgagtagggaataaaatattaggcagacagaacaactggatcataataatccaaacaagagatgatgggggcctaagctaaggcagaagcagtgaggacacagaataagggatggagctttaaaatagccattaagaaattgataaaagaatgagagtcaagatcatactcagttaggttcatacaagtcaggagctcagaaaagaagtgtgggccgcaagtatagatatgagaatgtgagtgagtgaaaaagaaaggtctgaaattcaaagacaaaaagatcaaagccagagcctgcccttctaatttaatcagaacaatgtaagaatataggataacaaatggcaaagttttaggaaaaaattgtgtaaaagattcataggaccaattcattttggttaaataattatgacgaatgttggcgctagagctttgtctgcataatttttgttatttattgtatatcttattctttttgaatgtggtatctctgaactcctattatgtaatgaggattttttaaatagacaaaacagaaaatcttcccccacccatgaagggtccatttttgaatgatcactatgtataatttaagctattggttaaggtccaagtcatattatatgaatcagtagtaagatatatttatgacagtgtataattctaatactgcttgtatttgggcaaaagtaaaatgccctgcttgaaaagaatcctgcagttgctacaatcatgtaaaaaaaaatagttgaagtatttttctcagttgatgagtgtagatctctagacatgaaatggtattaaaccttctgggaactttagatgaagctttcagagtgacatttctaaatttgaccaatttttaagtaaaggtaaaaatgtccaacaaaagagaaattattgatattatattcattttctatattataatttctgtttttttctactgatctataagttaattctgaagatagttttatgtaataaaatttgctcaaattatgatacataaacttccatctaagtataaagtcgtacataaagctcagatttttctaaacatgtgttgtaatatgttcaagtagctagacccaatacagataaattgtttattgtctctgagaatactttctaaagtactacttgaagactcaaatgttttttaatgttctcaaggcagtattttctttcatatcaataatttacaccatagtaaggttttttctttcagactatgcaaatgaggaatatgaactaattcagacaatatttacacaaaataaatgagtttaaaacatttgatttactttttaattttcaaggtggtattcaccaagaagatggaattgggttaagagcaataaaattgatagtttcctttttttgaaatcaaagaattaggtaataacaaaatgtttcaaatgctttcagcttctgttcttaacagttaattttaagaacatgtctatttatcatgttacataaagttaatgttttataatatcttgtgttttaaatttatttattgatatccatttatatatcttagtataatataaacacactgagcaaagatattttcaaaaagcagtctgaaattcagtaatttaattaagattagctccctccttcctactgtattttttataattaagtaagtctttccatgtcatgtaatctttgagcaatggcttttgtttgttatgggtggatgctatagcgtgccacccagatcccccactctaccctagaattgacttttaccccagtctctgggagggatgggtgctgagactgacaactcaatctctctctgggaattgccttttgctgaaaaaagctgcctcatccaagcttgtccccttcttctcaggatgcagcctccatctaaagcctggtcatggagtggtacaaaagttctgtccccttgcctcagtgtgagacatctctgtatggccatcctagcttcaaagctttctctggaatcaactgatgacttgattgaggctgcatcacagttccagtcttgcttcctttaccttcctacaggtgttgctcctaaaagtatttcccaataagtcatctagatgaaaactgcagcatctcagagtctgtttccctgggaaactgacatatggtgccagcaatagttgaaggaaccaggttataacagagtttttgaacaggttcccatcattgatggtagatgggtgcaatggaataaaccgtgttcccccaaattcatgtacggaagctataacgtcaatgtgattgtttttggagataggatttttaggaggtaattaaggttaaatgaggtcctaggaggaagattcatattctctctctttctctctgctttgtgagggcacagtgagaaggcgaccatctgaaagtcagaattagagccttcaccagaacccaaccatgctggcaccacaatttcagacttctagtctccaaaattgtgggaaaataaatttttcttcttgaagccacccagtctacggtagtttgttgtggcagccccagcagagtaaggcgggggttattgaaaaccctaccatgcagtagaggtgcaattgttataacttttacaggtggtgaattcagatgggattctggtgaaagagaatacacttgtcagtgaaatatctcaagtgtttgaatagttctggggaaatggtaactataaagaaagattacagaatcagcgttttctaaggactattgatgcattgacaaaaacaataacatttaagggtaattaacaaccaattcaaggtaaagtatgaaagccagagggcctccttgacagcatatgacaagacactcacacagctagaagcagacaatgcagagggttaggtatgaaattgtattgaaagaatagcagaggtacaaaaaagactgacttctcaatcccagcaagtctgctactctgaggtcagaaccctgcttagcaaagagtaggatcttgagatttgagaggggaatctggatcagtgaatttgaaaaccttgaatttctagattatcctctaccctctgcgaagtggcccgttcttccctgtaatagctatctttttccccttgtttgaagatgaagaagaagtctcagtcttgtaggacaatacacacttgtctcaggatctagctccacttttccattggcaccaaaacagtaattacttttataccacaacataatgcaaccatgaaagtgctaagcctgatgaagaaaatagaccataccacaaaataactgcaggtccaagtcaaaatgtagctgagatagtaactagaattcttagcattctgatatcaagggtaatggacatgaagttggacaatgaagagtttatttctgtgatacagtttttaacaccctggcaatgatcctgatataaacttagagaaagcaaaggttcacactgaatgaagtagagccaccagaactgccatgagacagcagaggaaagagttaagaggctgatggtagtagacttggtgagagaatacactgaataaggccaccaaacactccatgtgattctgttccatgggacggcccagggtaaaaaaaaaatgaccctctccaaaacataaggactgctcacatcatctgaagccctgaaggccaggccagagctgaacataagagatgctgctacaaccaagcaccctgagagcaatgcagatgatagaatcccagaatgatagaggccaagtggctgttcaaaacaggcacagtagtaatgacagcatggccagcgtgggtagtgtatgttgcctgagctacataaaaacatggagatacttgatagaacccaggaggaggataggtgggcaactatcaaagatactgctcaatctatttgatgaaaatatcaggagactattggaaaccagccagtagaaagtcatgatcccttttccagtttcctgaattacattagtatttcagcttcagaactcacatactgaaggagatgccaagtccctgggaaggccctacaactccactagtatataaagatgctccagtttcccacctaaaatagtttcagccatattcttagtaaccatatactagaaaaaagggtatacccagacatttcaagtagtacggacacagaatctaagttgatattagtacctggggacagtagttgtcatcacggccctgcataagcatgggaattggaaagccaagtaataaatgaagtcctgacccacatctggctcgcagaggtcactagattcagagatccagcccctgatcattttcctggaccctaatatataattggaatgcatatactcagtagttagttagaagaatcttcacaatgatttcttgacctgaggtgcaataaccatcatagtgggaaagactatgagaaagcttcttaaggtgcccttccattccagccaacagaaggaaataaaaaaataatattgcatccttggtggagtggcagagattagtgctattcttaaagatacgcagtatacaaaaacagtagtaatacaaaaacatttaattcatcagcctcactgctgcaaaattcaaaagtgacaatggagcatttaacactcaaccaagtggtagctccaaatgtagctgctttgtcagatgttatgtcttcataagcacataaccacacagccctgggaacatgatatgcagccactgggctggtttgtgtgttcattttcaactctattaggaaggaggattagaagcaatttgtctttacatgaaatagacaaatgtgtgcatatatagtctctccccagagctgtgttaactctcccaccctccataattatatagttaaagggacgagtactaactggacattctgtagaatatcactttcacccactatctcaaagccataatattaataaaaccagactagcaggaagcagcaagaattttaggtgttttgttaagccacatacacatacactccaggtgaaagacaaactttataaagattccaggaccaaccgtatcagtaaagttttaggcatcagtggggtatgtaggagcatgcccttgaagtacaggactgtccttgtacttctcacccctaaggaggaaacacagtgcctggtaggtctctttgcatttaggaagcagtgtattcctgtacccacattggagtcaactcattctgagtaggagtatgatttgttaaatgaacaatttgtttttttagttttaagggcatttaatcagaagttagggtttgggaaactaactcaggtgtattaattgtttaagtagaaatacagtttaatttttgctttgaagttggttcttcttaatttttttaacctaattactaatcctcacaaagatctttccaacaacaagttcagtaggtttgggtaacagtaagttgctactggcttctgactcactgaatgatggtgggattgcagtttcatcttctttataaactcgctcttcactggcaagtttaaatgacttggaaggctgtcagctttgagtaggacctagcaggaaatctctgtagccgttctaggccgcaatgcaagtggccctgctgcttgggtcttaaggcctggcagaccctatgttattatacagagtatatggtatggtaacagagataactgtggtggaaaagatcctgtatgaagtatatggcaaaccacagtaaaagcaccacagtgtaggtacatatgtttctggaacaaagataatgccatctgcaccagaaaattatgccaaagaccatggtgtgctactaccctggtagcatgatggtaggacatgaaatgattttgtgaccagaacttcccaccatggttttggtcctgtcagatgcatcaagtcatatgatgagacaagcctaacagcaatctcttgaagtggtgcatctgaaatagagtctaggtcatcagatactctggtgcttgcacaactgactcatgaacaaagtagttacggtggcagggaaggagtctttaacactacagactctcactgatcaaagctgatttaactactgctgctgttgaatagccaacctgccagcgatagaaacccacactgagcctctaatgtggcaacatttcaggaaggaccgaccagcctctccatggcaagttgattatattggactctttccactttagaagaaacagcaatttatcttgactgaaatcaatacattctgaatatgggtatgattttctttctcccagggcctccatcagccccattatctggggcacatttgatccacaaacacaggatcatatatcacatcagaccaagcagcccactttatagcacagaagggactactatgaacatatgaccatggatccactaatcataacagttacagcactgcccagtagctgctggtctgctggaccacagggatagcattttcaaacagcagctgatgtgccagcttggagagggtgctgtaaggagaggggctccatcctatagtatacaatgtacactcacatataatgaccgttacatggtattatgtccccagtagggagaataccaagacttgggaagaaaagtgatattgggattgcccctgattatctccacagacccatttggataatttatgctttctgtctctgaaactgtgtgtgtcaaagacccataagttctgaacctcagagagggaatgcttccaccggaggacacagcaagagtatcactaactgaattctgactgctacctggttactttgagctcttgaatgtgggatgtcccttagatggggtgtgtcctaagatgaggtagctttctttgactgaggtcaatgccgagggaggaacctcggctatgagccttcagcagccatgactcctggcatctgaggaaatgagtgtcttcatcttgaagaggggattggccaacaaccacagcatccactacagtccattccttgcactgctgggcagcgtacggcttttatggacatttcaccccatctgagaacagctttctcaggattctggtaagtttctcttcctcgcaaaattataggaaatcagtgacacaatttataattcccaacactggagctggtcttagggacacaatggatggtcatcattttatccatctgttgtagccacactaccactcaacttctcctctgcctcatctccttacagctatcgttgctgtgagcaagccctagtgggcatgcaactctccaccacggagccttatttccaaggactctgcccttcatatctcaatttcccctttcctcagagggacattaaatattttgcaataaatacagtgcttacaaacagccttacagagagtatattgacctgcaaacataatatcatctgctcacctatgacaattttcagcttgtaaggcaggtatctttctctaaaacttacctggaaaactggtagagaatcccccctaagagttttaattttgaggggacacaagtgcaaaaaagcagttacacttgctatattaattagtttgcaagggctgctataaccagcaccacaagctgaatggcttaaacaaaagaaatgtacctctcatggatctagaggctggaagttcaagattaaggcattggcaggtaagttccttctgagggccgagagggagaatctgttctaggctgttcctctcacctaacttctagtgatttgctggcaatttttggtgttccctggcttatggggcattaccccaatctcttcctttgtcttcacatagcattctccctgtgtgagtgtctctggtccaaatttccctttttataaggacaccaatcatgccggattaggagcctaccctattctaccatgacctcatcttaatttaacgaattatatatgttatgaccctatttccaaaataagattacattttgagatactggggattaggacctcagcatagcataggaattcttgtgagacacaattcaacccatggaactgaactttggggaaaagattgcatttctttgggaaattaagtgggagaaaatacaaactgtagaagtaataggcctgggactcttttcacgtggaaaatttagatcatgattccccaagaaaaatgacttgctgtccacttgctgtttggggcatctcctgcatggctgactttcagatgaggcagcagaaagcactagactccatttgtatcctgacttgtacctgtctctttgctccatctgaaaactttatggtagaaaaagaatcaagtgtcttctctgcatgagtccctagtaactggttacagctaatcttctggagaaggagaattcaatctagccattagaattatgggcacaacttctggaagatgaaaaccctcatcatcctgtttggttcactgaacctgaaaggcccacatgccatctctcatggccaaatcgaacatctgcatttcggttggtacatgcctttggagttggcactggccctgtgaccacagtgcattctattgcagctgttctagtggcttggctctttttttatccccttaggtcttctggtggagcaagaggacacccatggtggaagccaagagagtcatcttaatgaatggcatattacagcccttgtgaatgggacttgcattgttccatagcatagctggccaaattcctgtgattgacgggtcaagttaaatcaggcataaaagtgatgtggagtcttttctttcaggaaacctgtcacaaaagcactcttgtcccaaccaaggctcctttttgtatgcactcttagagaaaagttaaattttatatatgaatgtggagcatgtcctgtgtaggaggactctggaactaaagttagtcagacttacaaagtaaaaagctgtcccatgcccttacgtgtaccattcatgcggtggatctgggtgcacagacccctgactataaaacctgggtcaacgcctccagctgtggcctctcctctgacaaccaactcattaaacgcaggattcaggaacctggtagaacttggccacaactgcaaaaaacatatttcagtcccgaagtgtcagagtcgggggcagaggagggaggatgaaccaaacgctaaagcaaataaaaacatcttttaaaatgttgtctgcttgctgccaaatgggagctcagagggagtgccaccaggagcagttccacatggcgaggccttccgtggagaagcctggctggcaggctgggaggattcagtaattaacactgtcaaagcctcatgaggccccatttcagcagctcgatttggaaccggctgcccgagtacagtcacccttcagcggcacagctggggtgtggagtccatcagcagctggtgcatgtgtggcttaaactttgctgtgaggtagaaggaaatccgtggggattcttttgggtgctttaaccctgtggggatgggggctcacagtatctgatttttgaatagtcaattaaatgaggggctttaagaagctggagcagcccactcctggaaataatagcactgagatggctccataacaagatcagagccagagagccacacaaggatacttcaggctatagccccgtacttatggaacaggctgttgtgggctggaaggagggctgaggaaacattgggaaggatagataaagttacaacctatgaaatagactctgaaacagggtatggtaaggtagagtgatggccatctcttaaaaaaattagtgaataggagctgtgctgtaatggaagaaatgtaaactgggtttatggtttcaattcccaagaccaatactcttagcactgtgaagttagacaagttgctcaaccttttttaactcatttctttatatacataaaatcaggattatgatagctcatatggaatgtttatcatgaatatatatgtagaccgatactatctagtaaagaagctataaatatatgaatatatacacgtatgtatagttttgtgtatatctgtcatttattgatcaactactatgcactcaacaaacatttactgagtacctcctatgagcaggcaagtcttgatctataacaagtgagattcctcttctcttggggcatacattctagtaaatgaagaaaagaaaacagacaactgaacatgtaaataaataatatattttcagattgtggggagacctatcctcagcatttaaaaggatggtatgatgaagaactgataagactgctttaggtagaacagtcccaggatatttaaataattttcctcatgcaattttgctgatatccctgttgtggtaggcactactgttaccattcgccaacagagaaactgaagttctataggttagctctaacagagcaggtttaaaaatgtggatattcaatcagaattgagtgagctacactgaatacaacctctttagtacatggacatctaaaatcaatggatgtttccagcccacattcgcttttcttttgtaggtaaaatattgtttgctagaacctatatgtattatatattttgaatgaacgacatccactgagaattttggaatataggttacctatcattaagcattggaaaagacatgaaaggacctaagaccattacactgctaggttacagaccaggttcccgtcacaggcatttcaagcaatcttaggagactgtttcacaataaaccaagactcctctcaagagattaagacagttgagtggaacggcttcgaacaaatatctttgaattgggaaagatcgcatcttcggttttattcttttcatgtttcttactaaagcctttattacttgtcacgttgtaaatggtttaagtaaagggcagatacctaaacttgcatcgtggggaaaatattgcaacggggaggaggaaattaaatcatatacatctttgtcaaaacatgtttttagctagatttgaagcatcagtatcttttttttattatgccaagttttaaaattatgtgaaacgtatgtctcccttggacccacaggaaggacccagctaatgaagggtaaaatggtgctaatgagaagctaaaaccatagaggtgagagccaggattcaagctcacatctccacaatcattgttctttccagattactatattgctttctgcataaagaatcatgtaaatttgccaaacatcgcatcaggcacagggtagacaacaataaatgctgacgtctgtatatggctgaggaaatgaacgaacaaatggatgatggcacagatcccctccaccactgcttctctctcttatgtttcacgctctcttcttactacttcccagtgaagcccctaggttccaggcaccctaattctttggttgcccctgcctaacttttgctaaccttaaatgtcttgccttgtctcgtgttattttctcactcctttctcatcagccctctttctcaccccctgagtgtgcaaacgccttcccagcttcacctctcaaaaggctcccagacttagtaaatactatcagtcttgtctaagatttggcccagatttctctgacaccactgagtcccaagcacttaatttccaccctttgttgtctcactcaacctttaaaacaacccatatgtggtacggttctcattgtacactgaagaaaactgaagcccagagcatttaccagcttctccaaagttgccctgctggtaagtagtggagtgataaataaacctatgtcctctgtcctgatttgctggccaaaagcatgacaatggatcaacattggttctatttacccttccttccttagtggtgagtagtcaatagggtgacagtatgtagggaaggaaaataactgtgaaagatccttccgaatcaccccgtgcagaaccaagtagttgagtactggggagtggtaactaacatgttgggaagtagcattttggaaaaactttaatggtgagctttgtcacacactacatttcctagatctgctctgttaagcagctaattaattctcttggggcaattacccacctaccagaaatggtctgctgcaggcccatgcccctaggcacagtctgtgttaaataaacagcagaagaaccctgaagtggcagggttgtagccactccttcctcaggtcagcacttggaacacttgcttgctctgggccgggctgcacagcatcatgcacaggtgggtgttctgtaagtgctttttaatgatggtggtagtggtgatgcatgaaggtctgtttatacttgcagagagggtcgtgtattttaacaaggaggacttttgattggcatttcaaagaggccagtgttgttggaaaatgtcagcaccctgcgtaggagggcacttcataagtgttgagggattgggcctgctaggggattaggataattgttttggagtgaatgggcaggctcagtaaaggtgacctgaagtcattttaatgggcatcatggaactcatggtgacaactcagactagtggattaagatactctgatggaaattcccaatcactgcttagcactggttccgctgggatactggatgcctattgtattgctgtgcctggtagggtgactcagttgctgggctctagtaaagaaatgctgatcaaaggaactgccaccccaccatgtggcacagggctcctttgcctccaaagatgaaaggtgcctatttccatggcacttattattcagggagagtcttttaatgcatgccagttaaagatcaatcagggatgaagtcaaacagtctcagaatagaaagtcctatggatgaaagcaaagaagggaaactttctcctgagtaagcaccaggcctgcttgctgaaagttagtattacatctagtttgcaggctttaggaataaaagataagcgtcagaatgaatgcacaggtagattctgagtttaaaaaaatagtggtttatattatgtactagtagtccacgtctacctgcaatcctttatatatgatagaaatgttgggtaaaaaacttaaatttcaagtactggttgacccagcccaaaattattgaatcgggtcctttttttggccaaaggctgggatgctatcattgcccttcatgtttggatacttttgctttatgcaacttgaatttctttgtgcatgagactatccaatggccgtgagtatcacaaccaccctaaaagaactaaaagaaggtattctcgaaacaaaaactggctttctctgcaactttatttcatcatgaatatatgaagataattactgattggtgatttcaaagtttatagtgctgtcagctggcatgggggctttaaacaataatgctctgaacagttatagtttatctaaatcagatgctcattaaggaattggctagagtggacaaggagggaagcatagggcaggcagggcaacacatcagcttaggagctatggaatgtccagctttgctgcattgcgagatttgctcccgcagcaaacaaacaaactttgggttcctatagaatacaaattgaggaactgtatacacaagtagcactcagtctggaaattccatgccttcccacattggtttttgtaaacagagtcttaacacccacattacatacctggcctgggctgcctataatcattccagttcttttggtgagtagacaataactgtttcagatactagactcttttaagtttaatgcttatatgctgtatttatggagcataactggtccaagatagctcttctttaaattaaaaaatgcataatatgtaataaaatttactgtttctctatgcaacatgctctttctctacacacattcatctttgaaattcctcactcaggattctcaaagggccaaggagagtaatgaagatcttgatgaaatagcccaaaactttgaaatattctttctctagaacagtatcagaaccactgtgggtggttgttaaaaattgaaattcctggaattcaacccaggtctactaaatcaaaatcttgtgctgcttcaggaatcttccattcatataagtctcacaagcacttttgtgaacctctgccagatgccaccaacttgttttcagggacgacgctacacctattctagtgttttgggtgagtaattctcatgcttatagagaaattcatctaagtttgcttacctacatttttatctgattctagggagatggattagtgtccaaataatttatctaaaacagaaacaaggatttaaacaaaaatcttcttcctggtcctttctgctcctccctctcctccttttcactcttcttcttttctcttcttttaaaactttcctggcctcagttacaaacatatgtgtcatactgaggaagatagagggtaaaatgccagataacaataaaatgtcaaggtgagccaacctcgtttttgggattcatgtagaaagtctgaggggggaaaatttatttacaggtgggttctccagaggaagaatggcacactgcaaggctcttagggagagcataggagagctggaaaggtgaatgctgaagaataaaataaagacataatttatgaaagaggacaaacggtagtaaactgaagataccgagggatgtaaattttacacagaatacaacccagcgtcactatgctggtgaatgttgtgtgaggaagaaaagagtttaaagaaatttatttgacgtctagctgagccagagaagcgactactcacctacttattaccaaaaatatggaattacaaagttttagccaatatacctccattgcgactatcttcaagtcctaaaagtcacaggaaacacacccggataactgtctcactctcataaaaatccacattggctgggcatggtggctcacgcctgtaatcccaacactttgggaggccgaggtgggcagattgcttgagttcagaagctggagaccagcctggacaacacagtgaaacctcatctctactaaaaatacaaaaaactatcgaggcatggtgacgggcacctggcaaagcatggtatgatttggcgatccataggcctcttctggtcttatatgattccctaatccagctacagagcttttattcatttttagcaagaaaaccattcccctggcttaagaccgaatgctttaaaaagtccaaaatcacaaggcacaaaaacccactttacaaccaggtgctcggtgaaagtagctagaaaatcacggcccagggaggttgggctggagagacacggatggacagatgtggttgtgaactgtctgaggctggaagccctggcatcgtgtcccagagttggagaggggctgcaatcaggaagagcattaccagacagtaaaggaaactaaagggcagcatcgagtgaggaaacttcaaagacaacattttcttgcttcataataattctcaaggctgggtctgatgatgacattagtggaatgagtaaaataggtggaaaacctgaggcagggagaagttggatacttctttaatatgatgcatggacatagccaatattaagagacagactgtgtgtcaggcagtcatttaaccttcaggcagctattattttctctaaattaaaccaacactgagggattatttaggggaaaggatagactgattttccaatttgtcaaaggctaaagaaaaatataatcaacttcattctcctgtcaatgagagaacaatattcatgtactctttttctttggcaggattagttctaatcattcatgtctgtgagaactgaatttcctggagaaagccattgggaaggttgaacttagagttacatgttttcaaactgatcataaaatctttttctaagtggaaaataggttaaataatgtggtcttatcttcttacctatcctgtccctccagtttctggcttctggttgtgtagcaaggactttagggttgggggagcaaaatagttataaaatgttgagccctacaaatggtagatttggcttctgtgatcctgctaattgggtaggttcctgccttctccctcacccatacatccccacgggcttcactgcgtgcatggagacaagctgagggattgattgtaaagtaatgggatcaatgctcacaaacttgtgtgaatatcagccttatttagttctgggattcagttttgtcagtgtgctttggtgtgagattgggaagtaaacaaggcctttggtgaaaaggaaagagtgtattatatccacatggattcaaatttgtattaaaaaacacaaaccctgggtagtccagcaaacaaaaataataaaagcccaaatacaaaactgcaggtcagagcctttgggatgccagtttatgtcttctgttttaaagtcatatttcatatttataaatgctgttccaaactcaaactgtaaagcaggtttggatttggggatattttgggtcatctacctttcttgcagtactctatcattaaactagtaattgaaaggcaagtaaacaggagccatgcatttctttgacttttaaaatggagtatacatgaacatcaaatattgaaatttatctaagtatatatactattttactgatttgattatgtatagctgaaatgtttcttaacatattattctaagatggtactagcaaaaggaaatgattttcaaaaatgttctgaggagcacaagaatgaaaacaaaatgataccacactattgggaagcagagtctgtgtaatattattgttgttactgttaataataatatttcctaatctgtagcaacattaactagtatatagtaagagcttaactcatgttgaattaaaaaatcaaagttctataatactccatcttctacagcgtcttatattttgaagtcctgggtagaaatgtcagcataatcaataactaacctgccagcatagcagtgtaacagaaatctgtatcttaagacataaagaaaaatacctctactccccaggtctcatagatagaaaatgagccggtgattttgtaatctgctcatgtctcattgaagtaatgcattgtagaactgaagcatctactaagaggacgaatgtgcagtgaattcaaaccagttaaaccttaatagtgtaaatgaaacctttaaattgtgtgaaccactagcagccttgcaactctttacatgtgcaaaaaattgaatgaacacatatggtcaccatcaacttggttatttaattctgagatgacacacgtattgatctaactgaaaaggggaagctactatatagctggttgtaattagcccaccacaaatttctataactacttcagtctaaaccaaaagccaaaatggcatttcatgattacaccgtcccacccagatttgcatttcttgatgaattcccaaggttaggatatgagccatactgtaaaaccaaccctcaattacacctttttagaggggaagattagtggcaggtggtgcctgctataaaagcctcattaaaacaccttctggtggagtttcacaaaaggaagccaccagatggagacccatctccacatggcagtcttacctcaaatgagagtttcacctgacactttggggacagacaattttttctcacctaacaagccactgaggttcaaaagacgatctattaggattaatcgtacttgatcactaatccattgtaatgccatatgctgaaagccttgttcactgttaagcctggagccaggtagagcccctctggtaatgtaaaccctcccgttttcctgcagctaatctaatttcacctcctcccagacctcgcatgccaggaatgatgcttaactcttcctccactgcctctgatgcgtttttgaatggtagcaaatctgatctcaaaggtaatgacgctgaaacctgctgactaattggaaaatgattttcctggtggtggtgtttagtggggcgaatggataaaaggtattcattctattgtgcacaaattcaaagacttagccctggccttcttatctgcacagcttgatattactcatctcctcctcttccctccttctctaaatatgtgttcgttgaatctgaatttgaacaatcagccagctgggcagcaagagtgaaatttatgcctcatagaggaaattccatcaccttatgcagtccttgaaatggcaagtattttctccagtggtttgcctttggtataggtccaaaccattaagtgccaaacagcttaactcaccacatacacgcgtgcacatacacatatatagttttcttatgtgttttgtgttatgctacttacaaagcaccacccacaatgcactttcttgctcaaggccccatatttctgagttgcgcacataatcatacatacaggtgatatgagccccacacattttgctctatccgtgatctccaatatgaggagttaaatggaataactttcaaattccatgcaatattttatgatcacttggttccagccctaaacagactgctggagggaatagagaaaatattccatctgcaatgtacactaaacaatgtcatcaagatgacaagagtcgtcctaaagtcataccatgcattaagcaaatgaggccaggcccccagtgcataccaaatgctgtgcttcacaccttcctaaaaagtgctcccccaaatgccatgctatttaaagcattactgtaattgaaagatctaatcaatgtttcaaacatgtgatcctaatattgcataacgactagattgagggaaggtgcttattaaaatgcagattctaagagaataaaatacctaggaatccaacttacaaggtatgtgaagggacctcttcaagcagagctacaaaccactgctcaaggaaataaaagaggacacaaacaaatggaagaacattccatgatcatggatagaagaatcaacatcgtgaaaatggccatactgctcaatgtaatttatagattcaatgccatccccatcaagctaccaatgactttcttcacagaattggaaaaaactactttaaagtttatatggaaccaaaaaagagccctcatagccaagacaatcctaagccaaaagaacaaagctggaggcatcatgctacctgacttcaaactatactacaaggctacagtaaccaaaatagtatgttactgctaccaaaacagagatatagaccaatggaacagatcagaggcctcagaaataaccccacacatctacaaccatttgatttttgacaaacctgacaaaaacaagcaatgggaaaaggattccctatttaagaaatggtgctgggaaaactggctagccataggtagaaagctgaaactggatcccttccttacaccttatacaaaaattaattcaagatggagtaaagacttaaatgtaagacctaaaaccacaaaagccctagaataaaacctaggcaataccattcaggacataggcatgggcaaagacttaataactaaaacaccaaaagcaatggcaacaaaagccaaaattgacaaatggcatctaattaaactaaagagcttctgcacgggaaaagaaactatcatcagagtgaacaggcaacctacagaacgggagaaaatttttgcaatctatccatctgacaaagggctaatagccagaatcttcaaaaaacttaaacaaatttacaagaaaaaaaaaacatcaaaaagtgggcaaaggataggaacagacacttctcaaaagaggacatttatgcagccaacaaacttatgaaaaatgcttatcatcactggtcatcaaagaaatgcaaatcaaaaccacagtgagataccatctcatagcagttagaatggtgatcattaaaaagtcaggaaacaatagatactggagaaataggaatgcttttacactgttggtgggagagtaaattagttcaaccattgtggaagacagcgtggtgattcctcaaggatctagaattagaaataccatttgacccagcaatcccattactgggtatatacccaaaggtctctaaatcatgtaactataaagacacatgcacacatacgtttattgcggcactattcataatagcaaagacatggaaccaacccagatgtccatcaataatagactggataaagaaaatgtggcacatatacagcatggaatactatgcagccataaaaaaggacgagttcatgtcctttgcagggccatggatgaagttggaaaccatcattctcagcaaaatatcacaaggacagaaaaccaaacactgcatattctcactcataagtgggagttgaacaatgaaaacacatgggcacagggagggg

SEQ ID NO: 3135 - DNA, 4626 bp, Homo sapiens
ctgggtgagtactctaggcattcctggcagaggatacagcaggagcaaaggcctggaggctaaaaatagcttgcgggcaggggagctaccagcagttcagtgcttctggagtttaaagagcccggcgagggtcatgtcagatgacgccggtccacgagaaggagggtggattatatccttagagacgccatagagtgaggatataatggctctgtaacaagcataaactgtgatggtctgggatgccctcgtcatagacagcccctggagagtcaatggccaactggggatcatgcactctgaccattcaacagatgtcactcttctggtggacggagaagaaagaagtagcttattgacagttggaaagctggcaagtctgggggcttcctccaatggcctggatggtcctaggggctctggagacacgaggagagcccgtctatttgctgacagtggggagctacagcaatggctcccttccttccaagggaaacagcccatgacccacacctccccagcccccatgtttggccagaaaggctttttagcaatttctcatccactcattgcctgctgagctgcaattgccacctcccccaatgctgaagtgtgcagaagtttctctctgatccaggatgtaattagcacctgccaaagtactgggctgagatgagagtgggattccactcttctcccaaaaactgttcctcaagaagcagttggtgtctaggaagaaaatttctgacttggagggattaaaaagtgatcttctaaaatgcagaggcaggtggtgtttgtctgggcgaatgcgtctgggtttacatgtttgatttcagcaagcacactgacagatgcctggtgagctgcaaacacttactttgttcaataatgggcccataaccccacacatgaatgcctcatctgagaatattttactgtgctccccttgacacgagagaatcttctgtaggtaggaagaggttgtctgttaacagttgcttttatcttcatagttatttcatataaagcaaaacaagggacagagaactttagaggctctgtttatgataaattattttagggagctttgcaaccaattagatattcagtgataagtgaattcctgagaaggttgtggtcttaaaggacatagttgcacatggcatcagagtttttctttcaattttttttttttttttttaatgagaccaagtttctctcttgtcgcccaggctggagtccagtggcgtaatcttggctccctgcaacctccccctcctgaattcaaacgattctcctgccttagcctcccgagtagctggaattacaggcacatgccaccatgcccagataatttttgtatttttagtagagacagggtttcgccatgttggccaggctggtctcgaactcctgacctcaggtgatccgcccacctcaggctcccaaggtgttgggattacaggcatgagccaccgtgcctggcctttctttcaattttgaaagaagccaaagttgttcatacacagatgggttggctggccacagtgatagcagtaacgatgaacactgcaccatgccttttggtttctgaagaattttcacattcatggtttcttttgcactcacaacatccttatatccagtttgtagatttatatacagactcagagtggttaaataacttgggcaaaataaggggaggaactgacacgagatgtcatacattttcccagagaagaatcctccattctcctgccttgagaggtttgggtggaaatagagacacgagccttacaagtacatctgttgtattgaattagggtccaacacaattcataatttatctgaacttgattacacctgcaaagaccctatttccaagtaggggtaccaggagttaagacttcaacatatatttgaggagaagcacaattgaacccataacacactgttcataatgagatttgtgatgccaccaatggacctgtaacctgtcatgccgctgagcgtaagtcaactgtgtaatcactgtattagtccattttcacactgctgataaagacgtacctgagactgggaagaaaaagaggtttaatgggacttacagttccacatggctggagaggcctcagaatcatggcggaaagcaaaaggcacttcttacatggtgatggcaagagaaaatgaggaagatgcaaaaacggaaacccctgataaaaccatcagatctcgtgagacttgtttactaccatgagaatagaatgggggaaaccgcccccatgattcaaattacctcccaccggctccctcccacaacacgtgggaattatgggagtacaattcaaggtgagatttgggcggggaaacagagccaaatcatatcagtcactaattgcaacacagcctgaggacataagaaaaacttgtgctgtctcaaattatatcgttaaagacaggaagactctacagatgccgtcatagattatgcaccatgttttccttggctatgtacatttatgagatgaaggctttagctttctctaggaatagcacaagaggcaaggcattttttggaagaggatcagggtgggtttgcaattccagagaagtaagggtgaggtgaaagggaagtgagtccagaaaagggggaaagcaaacacaaagcaatgcacggctgggccggccacagctccctaagaaagatggagctgacttcacagtcacatggatgtcactggggaagccatctgaaccactgcattacagaacaacccattagggtggtggtgggagatgtgctggaagggcaggaaattcatcagccagccccttctgctctcctggctctcactggttaaagctcaccctcatggttggtaacttctccatgaggctatgttgaatcactgagtgcctctggggaaaccagaaccatgcactgtgttccatttgagaccagaagctgtaggaggagccaggtcatgttctgctgtaggagctgccagccgttcccaggcaggtgggctcagctcaagcagcctctgtgctagaggcaagtctgtacggtacagtctggggccagctgcacatgtggaccatgctgctgcagcctaggcagcctatgagtcagcggtgcccatccgcgttgcccagctggggaaggcatgctggaggctggagcaggtgggtgctctggctgccatccaacaaatggccccacgccggaggctgggcaaatccggaggggcaaatcaggacagattccatctccatatgttgtggctctattttggaaacgctgatcagcttgttacacctgtaaccatggatccctgccattcaccagtggatattttgaatgcatgaagttgatctcacgagttttctaaaccattgagctgacaggtgtgggctgtgacctgccacactctcctgcttggcacctggtgagagccagtgctcagatggaaaccacccttcttgcagcccctcctgaggaatcctccccatttcacatgggacagtctttgccaagtcagtacttaccattcctaactctgaggtgcagacctgcaatttgaaagccctacgaggaaatcagcgttgttgcaattgcctttacttggctcaaaagccgggtgagataaatcttctttaaaaagaggagggatgcaggcaattcctcagctcctgtgggggaatttttttaaaaaaaatttttagtagactatctactcgacatcaagtagagatgccccacccaggtccccttttagtaagagcttgttgctgccaatgtccgctccttcagggcttgctggggcttcagagggtgacttcagcccaggctgggcagggaagggcccttcccaggattgtccactttcaatgagtgatcaaggcaagggcttcaactcagccatcgtggcccagttctgctagacaaatccactccagagctccccagggggctgacgaggctttgctgggcctgcagtgcagcttgggttccttgtctgctcagtcctgcctgctggtcctcctgttcaccggtgtctacccctgataaccctctggcacagtgagtgcctcctcacatctgcttccagaggacctaacaggcaacacctctgtgacaaggtcctcttgcctgccctgtgacatgctggatgaagaagaggtgatgccctacatcagtcctttttgaaagagtgagttagtgacctaagcagggcagacgagacaggtcggcgactctggggaaaggaggtgctgtctgccagactgaatagtgtccagagggaatgctggtccatacgttctcagcagggaggtccagccagagaggaaagagcatcataatgggtcgtgctctaagaggctggggaggtgagctgacccaggcacacgctcaggtgggcaggcaccaggaaggctatccaggtaaggacttgattcccagacccaggattaaagtggccagctgaggccatgaatgtgaacttcaggagttgtttcagtgttcaggagctcggctgccactagcccatagagaaactttatacaaattaggagaaggcacctcctgtctgcccagttcccacctggatgtcatcccac

SEQ ID NO: 3136 - DNA, 3460 bp, Homo sapiens
gggagagagctgggcgggcggcgggagctgctctcgcgggccgcggccctcgccctggctgcaacggctgagatggatcttgaggcggcaaagaacggaacagcctggcgccccacgagcgcggagggcgactttgaactgggcatcagcaggtacatccccagcagccactggcttttccgttacacgccaatcagcaggactaagttcacccttggaaagaagttgtaaaaatcggttgatgcctttgaagacctttgttttggaggcttctttgaagggtcttgcatccggttctgaccttggagcaaacgtgttgtgtggcctcaaagaatgtcactgaggctccttttggaacagattcaggaagaaaaggctgtcttgaaaagtgctcccttccctttgtgcaggggggattcaatgaatatctgcattgtataacattcattgtattacgtaactcttgaaacttttacaaatgactttcatatacatcatctgattgttcagacttaaagggtgtcagacatctgctgttgatggctgtgctttttgaacaagggcagtgaagcaaaaactccctcccctcctgcccatcccctgttatgtctcttcctccttgtcttacccctccccctcctctcatcgccaggcttatttgtatttctcctttctgggaggataggtggggagggggaacttctgtacatccgaatcagttttgttcaagtggtagggggaagcagcgcttcctttgccttcatgtctttctcggttcccctggcccttgttaaactcacttcacaggctttatgagcggggcagaagttcccagtcaatggcgtgtgtctttgtttcctctttcactgtgggaatagtgaatcattttcgcctttagcctgaaatagtttatgaggctattacggtctctgagttcataccaggctacccagaaaaaattgacctgtgtcaagtgatcacccagagggacaaatttatcagtctctgtagtttgtcctcaagctgctaggggcttgattagctaactgaaaacatgcctacctgatgcttaaactgaagcattattttagcctgttaatgtggttgtgcagtaaccttgctgtatttcttctaagcaccattgtattttttcatagaaaatttagttttgccatgtagaattgaaaaagtgatagatggtgttacttccaatggaagtacttacacacgcaatagaaaaatatggttttcatcagctggctgtttaggcagggattgactgtgagtctattaatagatggcattttcatgaagaagtctatttatgtattgcactggcttaacatttgatgcgtgtgcaaaggagctattcctacaaaaggtgtagtaacacttcagaacccaggaaagtcctcagaggggaagcccacagcttctgctggaaagaagaaagcagctcaaaagagaaatacagaaagttaacaataagttaagaccacatgattatgaaatcaaatgtagtgaaactaatttttataaaagcagaccaaagataatatatttaaaggaagttaagcctgcttcaatcaaattagttatattcttgttctaattatgttgctattgcccatggcacattcttttgaacatatttagtggcagatgtttgtccagtgattttagtcaatactttacataatttggaatcatcttatgagtaaaactttatcatttacctggataaatgcatcatatttatgtaaaaatcatcatatatatataaatcatcatacacacacacacacacacactccctcatagagtttatattatagtacggaggacagacataaataatgtacatactaaataagtaaaccacagccaatgttagaaggtaattaacgccatggaaaaaagcattaatccaggttaaggggatcaggagtacaaaaggggagtactttgtaattttaagtagggtggttagggtagatcttattttaaaggtaatatttgagcaaagacttgaaagaaatgagaggagacagctgtgtgggtatctaaggggagagcattcccggaaaaggtaactggcaatgcaaagaccctgagtcaggtacatgtttggtgagttcatggaacagcagagagtccaggctggttggagcagagtaagcaggtttgggagtagggatgtggtcagagaggaaataagcaaacagatcgtgtaggacctcagaggttaatgcaaggattttggcttttattgtaagaaaaaggaaagccattgtaggtttttgagcaaagaagtagtgtatggcttggcattttgaaataattactctgactgctagttgaagatagactgaagcggcataggtggaagtggagagactaggcaggaggctgccctactggtgacagcaatgaaactggtgataagtggttaaattctagatgtactttgaatgtatcaccaacaagattgcctgacaccactctccacaatccttcagaagaatagacattcctaattttaaatcatgattttttttaattttagaaaacaaataacttaattgacttagcgacactgttagcatacttatctttcctgtgtatgtgagctctgtaaggcaggcgaccatttcttatgtatccatgtatctttgtagtaccttcgacagttacttttgtgcttgctatgtttgttgaactgaataattttgacattttgtgaacatcactcttatatttgaaaatataatagttgaatattgtaactaaacatatttatgttcaattgattgtaaaacattttgtaacagttttaaattgaagcaattctattttttacagcaaacaaaaaaggaaaaaaacgaagacagtgaaaatgattggagtattaacattggtaagctgtgaaatgttaaatgtgaataatcctaccttttattcaaatttgaggtattgaatcaattacctttaaagcaaatactttaagattgtctagctaggcgagctgactcatacttgtaatcccagcactttgggagactgaggtgggagggttgcttgagcacaagagtttgagaccagcctggacaacatagtgagatctcatctctacaaaataataaaaataaaaatcttaaaaaatagcatatgtcatggcatgaacctgtagtcccagctacttgggaggctgaggcaggagggtcttaggagtctgaggctgcagtgagttatgatcacaccactgcactccagcctgggtggcagagcaagaccctgtctcaaaaacaacgacaacaaaaaactgtctgcagacagcaataaattgtccttgctgcacctgtgctgtataagtttggcttattatagtcaatgacccacattcttaagatggatgattttttaaaaagtagagacaggctggcgatgacaccggacagag

SEQ ID NO: 3137 - DNA, 1750 bp, Homo sapiens
gtagataccaacacagatatagaaatggaaatggaagcttagagaaattaagtaacttgtcactgtaagagccaggtagtccaactccagtgtccaggctcttaaccactgttttgccttagaatttatcccatcccagggccactgtagttttcaatgcctagtgcttagattagaacagtgctcagcacataaaaggcatttaatacagtgaatctttattttagatctcattcatcctcagagttgttataccacttatgtattaagtactttctgaaacaaagcatggttacatgtgtcaatatttcccctgttttgcaagtgaggaaaatgagactcaggttaggtatccagcccagggttacacagtggcaaagccaaggcttaagatccgggtcatctggactttaaaacttatctgtggctgggcaaagtggctcacacctctaatcccagcatgttgggaggctgagacagaaggatcacttgagcccaggggtttgagaccagtccaggaaacatcaggagactctgtctctacgaaaaatttaaaaattagctgggtgtggtagtgtgcacctatagtctcagctactcaagagactgaagtgggatgatcagttgagcccaggagtttgaggctgcagtaagctatgatcacaccaccgtactgcagcctgggtgacagagcaagaccccgtctcaaaaacaaaacaaaacaaaaaaaccttacctgtgcatgagtgagtttgaagaaggtgagaacttgaacacagtagtgatcacacaagagaattctgcagaaaaaaaaaaagccccaatgaggtaaccctctaacccttctactcacatctgttttgccttgtatgcattggacttcaggcaattacctttctaagccacatattcctcgtctttaaaatgggacaacaatagtacctacctcataagattgttttgaaaaataaatgaaaaaaaacacttaaaaggtattccacatagtgcatagcacatggtaagcccttaataaatgttagcctgtatcatataattattatagagtagtattcaatggccacattttttattgcctccaatttccacaaggtggcatgtcaagttcaaagtgaaccccacggccttgcatcccaatggcaaaacctacttaacttgcttcagaataacatggccaaatctaaactgttggaaacttcttctatagaaggtttgtcatggttcagaaatcttattgtcactgtaaactccttcttaaggaaacatgtggaacatttaatttaatcatctggcttctctggattcccaggaccatcttcatttacatgaatgtgcattagctctgacatggatcacctgcagaattgagtgcattcatgtcatctcattaagccctaagtttagtccctgaagattgaaagaagagaaaaatagccagctgcagagagtcctgggctctgtggttggtgagctgcagaagcagaagatactgacaggtaataagagggccaagtagaccaccctgccatggattggagccatgtaagacccatcctgtgtacactcagagctgactctttcctaggaagtgagtggtatggatagacatgcgtcttttccaattcttcctgtgcctcacctcagtcttcaggactccaaggaggtaggaccaaaaagcacagggcccctgagtgttatttcagatcctctgtgtaaccagcccacacctgag

SEQ ID NO: 3138 - DNA, 2861 bp, Homo sapiens
aaaattccctaattttataaatagtatgtatattagaagatatctgtaatcttgaaacttagagatggagctgactttagaaagttctaattcaacatctaactcagacttttgatgttaagtaataatcgtacatatgtattgctatttgctaggcacttccgtaaatgctttaaatatactaaattctcataatattcctaagagataggtaccattttcatcttgtttcacagaacagtaaattgaagcataaaaaaatgtaagtaacttaccagaagttacatagctagagttgaaccttggcagtgtgagtctctgagatcctcatcaccatgctacattgtaaaagaactataccaagacctcctggaagaggttacttctgccccctctaagcatctgaggcctgatgctgtctctgagtactttctgggatttccatattttgctctaggcaactcttctcacttccatattcgaaacctgccatatgaggttctaaaagtaaggacaaattgtcacagaatgggtcctatctagaccctgctcttttattttaattctgagaaaagagtatcaattcagctatacagaacccaagtaccttttctttctcaactccaggagtctgctctctgttggtgctaaatatgggcaaaaaatgtcaagttatgtagaaaggactcttgtataaaccttttggagtgatggatggctgcttggtagtgacagtgcaataatggcttccctgagtcattgtgctatgcctgggagaagtgagaagtcagggacaactggtctcagagagggagcagttcttcagcttaactttgtatggatcaagttcttcattccccatgacagggattatatttcagtggtcgctaatttgaggacaggatccagacagagattaatgagaaaccctaaccctctctggaatgtgagcctgggactgcagagcttggttccagaaaaactggtttaagaagccagaagcccaaattgtctaaagtaggatattagacccttggctaatgaaagatgagcaccctgaacataggccctggtctggggcttggtgtgcaatgttcagatcatgctcttaccttgtaagttcaatcctgtgatgatcagcaagaaggtgactcagtatacaaacaggcatatttaaattttaaatttccctgaaacatcaggattatttaaaatctaaagcgtgatgatcatggcccctccttcagagaagcatgtaagaagattagttctgataacaggaaggacttgattcatttgttcaatttttcattcaaccataaactgacaagtatttttttggtacctatgccaggcattatgctaggcactggggacacaagtaacaaagtgatttaagtaacttgaaaatttggtaaagggtggacatgaaataaacatgcactcaaataaatgtataattttatttatttatttatttttagacagagtttctctctgtcacccaggctggagtgcagtggcacaatctcggctcatcgcaacctccatctcccaggttcaagcgattctcctcccaagtagctgggactacaggcacatgccaccactcccggctaatttttgtatttttagtagagatgggctttcactgtattggccaggctgatctcagactcctgaccttgtgatttgcctgcctcggcctcccaaagtactgggattacaggcatgagccactgtgcctggcccataaatgtatagttttaattgtgttaaatgccaagaaagataataatgggagtaggagcatctaatttctctaggaagatctttctccttagtaaatcttgaatcctttggggatcccacttagggaaggtttatgaagactgctgggatctgatgggatctccataaatatcagaggatataagtggatttggaagcggaataattttcctttctggtctgcacattctctcacaccatacattagccaggtatgtgttattcccagtttcattccgagcacctagacacaatggctagcatgtagtaggtattcattaatgttaattgaataaatgaataacttaaaagccgacattcttttacttgtctgtttttgtttaagttgttcagggcagagctgaaagtaggagatggaatcatatcataagtcccaaaccgggagatgacctacagaatatgtgaaaagcttgtgaacaataccagagagaaaaggatagtgaagtcaaagtccagttggaaggaaaagaaattatctcatattgagacttacagatcaggatgaggcaacaggttcctgccagtaaaacttttcattccagccttagtgactatcatctaggccttcatgccaggatggcagagaaatgctgtctctgctcttcagtgcctttcaacagactttcagttatgagatgaacaaattctgggaatctaatatattgcatgggtggtgagggatgtattaatgaatttggttgtggtgatacacagtgtttacaaatatcaagtcatcatgttctacactttgaatatatacaatctatttgtcacttaaatatttttatcaagaaataaagaaaatgagaaggaacctcttcaactctggagataccaatgaatcaggtaatggcagaatgaggaggaaggagaagtatggagagtttgaaacagagaacaatgaataaaatgtcttttcctttttttgtccttaataacaaactttctaagataaagtttattttggtttaactttagataaccctattgatatagccaagtttccacagtaatgtcaacagtagaattgtgcaggctctgaaatgagg

SEQ ID NO: 3139 - DNA, 261 bp, Homo sapiens
cttatttatctcttccccagcttgagtctgggtcctactgtcttggccagggtaagcggatcacaaagtcaggagatcgagaccatcttggccaacatggtgaaaccccgtctctactaaaaatacaaaaattagctgggtgtggtggtgcacacctgtaatcccagctactcaggagactgaggcaggagaatcgcttgaacccaggaggcggagactctagtgaaccaagatagcgccactgcactccagcctggcaac

SEQ ID NO: 3140 - DNA, 2586 bp, Homo sapiens
ccatggccagtgtcagccaccaggcatgtgagtgaatgaaccttcagatgattccaaccctgagccttcgagctaccccagctgacgcagagcagagcagagatgagctttccctgccttgacctgtccaaatgcacattgaaaatggtaaacaagggaaagaaagaggagttccagaccctgcataccaaaatattacagacacacaggaaatgactcttcaaatccaggctgtaaacctgtcatttcgtgggcttgtctgtgggcctagaaaagcgagacaaagatcacaccgaagacattactgtttggggctggctgtactggaggacctctggaggcctttccatgccaggtgctatgattctaaactcaagtcataaaatgaaatgttagaggaaagccaatgaaatttgaggcagaacttgtggcttaaagctcattttgctttaaaaaatgtagactttgaaaaactgttctttacaagcaacaaaaattttttaaagaaactgaaaagctaaaaaatattttttggggggagggagtaatattctcagccctattactatcttttaaggctttcgattacagatactccaaacatgtaataagttactaagtccttaaaatatgtattaatcttcctaaaagatttgcatattgactttaatccacgtaaaagatgtttctggtgtatttaaccaatgctgctcgtctgtttagtgaaatggttttggatccattaattctccaaatatttgtattctgagtgccttctaaggataagacattctttgaatcaaacacacacaaagaactaagccaatctaatggttaatgcagtcattcctccctcctccagcttaatgtactggccccggagccagaatgcctgggtttcccagctccagtgccttgaacaaattacataacctctctgtaccagttctctcccctgaaaagtagggttagtaatagcacctacctcatcaaactaaatgactcaatacatgtaaagcatgtagaaaaatgcctggcacatagcaagcattcaataaatgttggctattcattttgtgcccagtatgagggaaagcaatgtagaggtggatatggagataaataaaacaaagtgcattaaagagggaatatttcaactggttcttggagaaaatacggagttcacaaggaagacaaaaaagggccaagtcaagcaaatggtgtgagtgaaggcacagaaccacgaaactaaatagcatatctggggaattgtaaatgattcattagagctagattaagaggcatgtgacatatgctgcctccatccaaaagcaaagattttaaaaaagagagagaaaaaatagaggcacatgggaatgagggagtagaaaccacaggatttactgaccaaacctatgtgataggaagtgaggtagagcaggtttctgggtttatggtgatgccattaatcagaaacaaaatgtggtacatggtgtgacctttgacacaatgtgtttggacatacagtatgggagggacctttaagaaccaagtggagatgtacaattggatacacaaatctaggctttataagagcactctggcaagccatacagtataggggatcatcaaagtgttactgattgtagtagccatgaacttggttgaaatcttcaagaacaagggtagagaatgagaagaataacaatgtagactacactggcaaccaggggcagttggaagagaaggaaccagagaaaatagaaccagaatagcatggagccctggaagaaaccaaaagagtaaatcagttttgcactaattgatggttttagtggaaaaatgacagaaaacccaattcaaacttgtttacattgttaataagacatattggcccatataactgaaaacacaagcctctggatggggggatagcattataccaagacaaatgagaatcaaccctaagccaggggtgaggaattcagcttacttgcaacatttagcagtcatattgagtgcctactatgtgccaggcattgttctagtcaatgaacaaaacaggcaaaaagtcccttgtctgtggacagaacacacaaatgcctcttggtatctccccacactctcttttcattgaaaggcaatgcttcaaaaaattggaaaaattatctatgtggaggaagatgaagagagaaaactttagaatgtaatgcaaattccaaaacatttgctgggaattttaacacgattttgtaggaatatgtgaaacttctgtactattatgaaatggaggggtgacatagggaagcagtacagtatggataaaaattctaaaattccaaaataccacccatgttttaaagtccagttatgaattcagattagtcagtttttgacttaatcaaattgagttgctgcatttattcggattatatagacctgtaaaaatacttagaggtttcaaatgtctctggtagagctttgtacctaacttgtgtgacatattttaaatgtagattatgttcaaacctgcattaatccattcatattttaaatttaaaaatataattagcaataaaagaaagc

SEQ ID NO: 3141 - DNA, 32863 bp, Homo sapiens
cgattctcctgcctcaggcgcctgagtagcttggactaccggcatatgtcaccacacccagcaatttcttattttttaattgcaaagaaaatctttacctttttctttctgacttgaagcaggtcatcagattgtcaacagctgcacctttcctcattttgatgcttatttaccccctttatttacccccatagctactcccacacagctgaaataaatgggtaatttattagaacccagcctcttaattagttatacacctttaacattggcttgaatcttggaggcccatcccagcacccacattggttccaagattttcagcctagtgtagtggctataaatagctcatttctatctacacttaagttttgaaagaaggaaagaaagaaagagagacagaaaaagaaagaaagaaaagaaagagagaaagaaaggttgctgtagttagagtcagaagaagagtttgttgaagaagtagaatttgttgaagttgttaattctggtaataactgctaaccagctgctagatagaaaatatgaagagagaaaaatcgagccctaggtcaccattacttcactgtgcctctgacattagctcttcccccaggatatacataggagatatgcttcctgagagaaaggaccacgcttctcctgtttaccatgctgtctcccactctagcacatccttcagcgatgctgaccggtggaaaccagagcagtacctcgtgtatactacgctatcgtaagctattataagcattgttctttttcttctcccacccagaaacctgaaggttttcttttccttactctgttcctctgtgagttttgagaatttctgtacctctcttatgatacacgatattactggcatagtgcgttcataacacttcctagatgctactcatatgtggcatgagccttcttaatcaacactaaactccttctaaactaaaaagcataatccctgttacttatatctgtatttaaagtggagttttccctgagttgtttctttttcttttttttttttttgagacggagtctcgcattgttgcccaggctggagtgcagtggcgcgatttcggctcactgcaagcctagcgggttcacgccattctcctgcctcagcctcccaagtagctgggactgcaggcgtgtgccatcatgcctggtaaatttttttgtatctttagtagagagcgggtcttaccgtgttagccaggatggtctcgatcccctgaccttgtgatccacctgcctcggcctcccaaagtgctgggattacaggcgtgagccaccgcgcccggctcctgagttgtttcttgtagatgaaacagtaatttcttggtctgcttatattattttgcaaacttgtcttttactttcacctaaattgttaggataaagtaaagatttagactgattattggtacagttgcatctcactactattgtactgttcactatttcacatatacaataagaaactatatatccctatattatatttgcctaaaggcagaaggaagattaaaggtaccatctaactcagtgtttgctcattatgctcattttcatgttgacaaacttctttatgaatataacaattattccttgatttctgcaactcatggcagcactaaaatagattacagctccaggtttatgttctgcttacattcaggacaagggctctgaacaattgcacatttccaggagaggagtttccatggaaacttggacaaaggcaaaacaaaataattcttcaaggcctatgagaaaaaaatttcaccttgctttttatttgcagttctgtgtcccctgagcagttcagccagcttgcagctgcccttgctctctaggaatccccgtttgaaaattatatatagcattatgcatctctgaaatctgcaaaataggatttgatgagtgtaaatgaagagttatttctctggaaggctcaaacccagaggtttattacaatacaatttttaaaagttaaagcatacatttaagtagccactgaatttatgaatatggaggtgtttttcaaattataaaatccttaaaataggcctcaagaagagagttttaggataaataaatggaatcagtgattagagacaattaggcatttcaaggcaatttgctagctgaaaataaagaccaggtcaaatgattttcggtaaatgtatggatcatatatcttgggtaaaaggaagtcagggggttcatataaagtccttcggagaatgatgtgtctcctgttggtttgcaaaatcctgtacagcacgctgtcttatttattcttgtatcttctatggcactaagcacagtatttttaaggcactttgggggctggatgggtgtagtgaagagcattcaccatctccctcaagagtccagcatcacagtcagaaacagagtactctctgcttcctaggcaaaactattgacactatttaataacttcatcatacagttcatattttatcgaggaacctgccccgatagtcacataggttcttttctattttccctaagcatcggccggtttgagaaataaagggacagagtacaaaagagagaaattttaaggctgggcatccgggggagacatcacatgtcagtaggttccgtgatgccccacaagccacaaaaccagcaagtttttattgggactttcaaaaggggagggagtgtacaaatagggtgtgggtcacaaagatccgtacttcacaaggtaatagaatatcacaaggcaaatggaggcagggcgagatcacaggaccacaggaccggggcaaaattaaaattgctaatgaagtttcgggcaccattgtcattgataacatcttattaggagacagggttttgagagcaacaggtctgaccaaaatttattaggcaggaatttcctcttcctaataagcctgggagtgctgtgggagactggggtttatttcacccctacagtctctaccatagaagacggccacacccaagggggccatttatagacccaccctcaggggcatattctctttctcagggatgttccttgctgagaaaaagaattcagtgatatttctcccatttgcctttgaaagaagagaaatatggctctgttctgcccggctcaccggtggtcagagtttaaggttatctctcttattccctgaacaattgctgttatcctgttctttttttcaaggtgcccagatttcatattgttcaaacacacatgctctacaatttgtgcagttaacgcaattatcacagggtcctgaggcgacatacatcctcctcagctgacaagattaagagattaaagacaggcataggaaatcacaagggtattgattggggaagtgataagtgtccatgaaatcttcacaatttatgtttagagactgcagtaaagacaggcataagaaattataaaaatattaatttggaaaacaaataaatgtccatgaaatcttcataatccacgttcttctgccatggcttcagccagtccctctgtttggggtccctgacatcccgcaataatatttcactttcttttcgttattgagcttaattgtaatcatattcagaaacatatccactcttcgatgcattctttcaacaataacttctgaataatataccaagtactatgccaggaatgtgccctcaaggagtccataaagggctgctgactttaaaaaaagatgatacaaaactaaagaaaaacacagacaacaaaatgtggttactgtactctgtaatatctcataatgttgaggactgtcatgggttttatgggtgtccagagcaggggcatgtgactcagctcagtggtgcctgtcatatgggggttagatcaggtaaggccttcacagagaaatgtttgttctcagcgtttttgttgttgttgttgttgttgtttgtttgtgacatggagtctcgctctgtcacccaggctggagtgcagtggcgtgatctcggttcactgcaacgtctgcctcccaggttcaagtgattctcctgcctcagccgcccgagtagctgcgactacaggcacatgccaccacacccagctaattttttgtatttttattagagacagggtttcaccttgttagccaggttggtctcgacctcctgacctcatgattcacctggctcggcctcccaaagtgctaggattacaggtgtgagccaccgcacccggcctgttctcagtcttgaaggatgattagatgtgaataaggcattcaagcagggaaacacattcagagagaggaaacatatgtaaaaacacaggaacatggaagaatgccaatgtttcaggcactgaacattgggtttaatgtaaggagtaatgggcatgagcttgaagaaggcagaagccaggtcctcaaatgcctttatgtgaagttaacaagtgggaattttatgctaaagatagggaacccagtgagttatctcagtgaaagaagggctaaatctgtaccattgtcctaatttaagtgttaggggcagaggaagtccgtaatagaagggagaccagttacggggcaaagaggcaatattgactccctatagtgagggtcaaaactacagtggtatagacaacatggaagggataaggagatctggaagatagatgagcttggtaaccaattgtttcggcagggtataaaaaagaggaaggactggagtggatttcaaatttctaatgcaagtgctgggaaagtggtaatactgttaagtgaaattagtacaagaagcgaaaacaaaaaacaaacaaaaaactccataaagattataaagatttagggtatggctttagcctgactgctcacctgacctcaaacaagattcttaaccactttgagcctcattcctttgagatgatcatgtgggattgtttggaggattaaatgagataatgtttacaaaacattcacacatttgctcaatctatattttctgagcatttattgtgtaccagggtaaggggttcagagttcagaggtgtttaagacaaagtttctgctcttataatatatctgttgtatgtatgggaagatagacataaataagttaacaaataaatgagtaaacttcgaaaccccctctctactaaaaatacaaaaattatccgggtgcagtggtgggcacctgtaatcccagctactccggaggctgagacaaaagaatcgcttgaatccgggaggcggaggttgcagtgagccgagatcatgccactgcactccagcctgggcgacagagccagactccttctaaaaataaatatataggtaaactaattatagatttggaagcgtgctttgaaagaaataaaaatgttgatgtgacagttacagacagggttgagagttctactttttgataagttgttaagaaaggctaaaacttgcagggagttattcagtcagagacagctaatcatagttgaggaacagcatccgaggctgagaaaaccacaaagactctgaattgggaaagaatttggaaggacagtacacacctagcaaatccctaaatataataaacacacaataaataatagatattatgtttagaaacaagaagacatgtattgattatatgccatggaaaactatctgaacaaaatacctaattcatttattgcatacataatatagtcagaacaatatttaaaattgacacatttgcaaatgtatctttatatttaagaacgtgaatacaattgtaaatggagtgaagggttgggaaggagttctctaaagtaatattgaggtttatggactaggaattcttgtagggaattgtgtgattaatatgcttccccatggtattggaaatatatttttctttattttccaattagttttttatttgtttgagtcagactcaaccttaacatcagtggatcctccaaagatgggagactacctttttgaagactgcaatccacacaactctatatagaaaactctatgttaactttcatgcttttagtagaaatctctattattagtcactgctgcatttttttctgtgcagtgatagaagatatatcatctatttttttttttttttgagatggagtctcgctctgttgcccaggctggagtgcaatggcgcgatcttggctcactgcaacctctgcctcctgggttcaagtgattctcctgcctcagcctcctgagtagctgggattacaggcatgcaccaccacgcccagctaattttttttgtatttttagtagagacagggtttcaccatgttgttcaagctggtttcgaactcctgaccttgtgatcctcctgtctcagcctcccaaagtgcagggattacaagtgtgagccactgtgtccggccaatatatcatctaaatgataaaaaaatcactcaatatagattgtgttacattttttaaaaattgcaaatgtcatatgttatacagggaaattattaagtaactatcccgtcctagtgttcaagtgttatgtctgagagtttgctgttttacatgcaaaggaaagattataaacaacttctgtaccacatcaacgaagtcattcaaatttgatattaatcctagttaagcaatttgcctggcattcatttgatttgtcttcttaaactagaatgcatagtaaaaatgggttgcaaatatttggtagttataaatttaggattgaaaatatagaaacattaaacttagactgatgtgttaaagcatgttgataatatcaattaaaaatttaaatgtcaaaggaattaaccaaaaaagaaatagcttagcagacgttaaaaccacaaaacaggaataggactattctagaattcaatgaatgacagcctccacgtctgttcagagtgaattctaacaaatagctaatgaatataaacagtctatttaagtgctgctggaaaattccccttcaaccagcagctgacatgactgttgtcattcaaagggcataagcaaatgtcaaataattgaatcattgagaaactgagatgacaatggcctacattctccttaatgctttttgaaaattcttccctgggctattcaatagatgatgtttaataacggtattaagctaaagaaaaaccacgggaagtcaaagtttaaatagggcttaactctttaattggagattcctcagggaaattggctgtggctcttgcataccaggttgagtgtgtttctgtaaaattgcactgataggatcctgaatcaccatgttttatagataagagaaatacaaacttcacatgaaacaatgtggtgctccaatccagtatgaagattgtcatatcctagcacaggcagcgccttccaattcttttcctgccttcctataactgagtatgtgtgtccttaacatttttaaaggaactgtaggccagcaaggtgctctttgctagaattaaggtccatgttctccttgtacccccatttcctgtttcttcatttgccgttggcttttatctggttttcattaactcagggacttacatatccattcattagttggcatcttctagcctgacaccgtgactgatcttggatttgcttcttgattcttcctttgtctcttggatccaatataactatgtgtctttggaactaactccacacatttttctgtttttagtcttgctacatcctgctctaaggcgagtgggttataggtatatccagcaataccattctagaaaagacaatctttaataatagaggctctaatgccaaatcccatgcatcttttagtaacgaacagaaataacttctacatccttcaagtttaaaaatattcatagcagattctcagaattttaatggttactcagatttgagctctgtggcataaattgtccagctagtctgtaggagcaaggcaggttattgcatctggaactatagcaagacaacaaaatcgattattctagatgtaatctgaatacttctataatgttcattaaagatgtactttaattatgaatacaaaagttaacattaatttgcaaacattgcaataagttacatacagttgatgtgttaatacaaactactaaaacaagttattgaaaaattctctgggaattcatgaaatgatctttgttctagatcaaaatatacttgtttatcctagatgcatgaaatgtggtgatgatgggataaatctgattccaaagcccacacattaaaactagcctccctgttttagtcatatatcaaatatgtccagtagtggatacttttgaggctccccccagaggctctggatctcctttactgggtataaacacccgttgctcagctcctttactcatagttttgccactaacagctgttaccagcagccctcttccaagactatctttgggctacaaattgctttacccagcagctgggaggcagggttgctggaagtgcctgggaggctacccttctcaggtaaaaggagagattaattctgcagatgagtaccatagacacaacattaacatgagtctaagaagcacatctctcacatttttacatgttttaactgggatgcaacttataatcgacttgttctacttcaagtggtagtttactttgtacacacaataaggatatgtctgatgtttgatggtgagttagagtcaatgaaattagggactagaaaagagtgaacaaaaactgtttgaaaataatcatgaagaggtttaggaaaaaactaacatttaaactggtaatatgtggaagtgtcaggcaacccatcctatcgttttgcaagtatgctatctggaaattaaggccaatcgtagtttaggtaaaagttaaaggaagagagcaacatttaacagggatcctactgtgtgtccagcactgaagtaggttctctgcctccagcaactttttcatttcataataaatttttgggccaggaggtgacataatcacaaggaaattttttgaagaagatccaggcccaaatcagatgcttgagaatcactgcactgattggcatcaagatggttttacaaccatctgcttttgatgacttctattttcccagcagccaaacccctattctaggcaggaaaatcattagctatagaggaggcagatctgggttctcatcctcattcagtcattgggaaaccagtggtcaccaagaattggactctacaaatttggcttcttatatacatcctttccaggaccaggaatggcctgaagtgggagagaacctgcagtttggaagtagagagatgcaataataggtagtcaggcagaacatctttggggtctttaatctgttcatcacaatataaagtgctgtcttcattaaatctagtatttgagagattttttctatcaaataatgtttaatcataacagtccatttcattcatctataactgtcaaatggagctactgggcagcaaaaaatagctaagagtaccactttgaaggccgggcacggtggctcaagcctgtaatcccagcactttgggaggccgagacaggcggatcacgaggtcaggagatagagaccatcctggctaatacagtgaaaccccgtctctactaaaaatacaaaaaattagccgggtgcggtggcgggcgcctgtagtcccagctactcgggaggctgaggcaggagaatggcgtgaacccgggaggcggagcttgtagtgagctgagatcgcgccactgcactccagcctgggcgacagagtaagactccgtctcaaaaaaaaaaaaaaaaaaaagaaaagaaataaaatgcatagcaatataaaaagaaaaaggaactaaaattctatctgtagatcccaagttaagaacccctgggaagaagcttgcttcaagttgagtgaaaaagccaggaagaagtagccagatgatgatggtaagaaggtagaaaagagtattccaggaaagagaaatattacgtggaaagagtaagaggtaagagtaagagtaagaggccaaggcacaggcaaagagtttgctttttcagctcaaaatttaagggtactgtaggtccagctaaaaacaaagagacttgctctttttaatcatctgtgcagctataataagggcacatgtatgatgcgtcctttagtctatttagtctattatactttgttatataaacagaatatataaaaatctttctataaattgttctctatgattatgtactagtgagaaaataaacatgttgttttagtatatcaagctgcaaatattactatgctaactttcaaaatgaatgatttaaaatagactatactgatctgaatcactttttatgtacaatattaaatcaggaatcaaatcacagctggggacctaaatgtatatttataagagatattcttctctgctcctgggattttcattctgaaatacctttagtagaaaagcaaagcacataatagtagttgaacttttctgtaatgtgtttctggagattaggtcattatgcgggttttaaaagacatgttacaagcatcagatattgtgtttccattacatggggactcaataagtacttaaatgaaaccaaaaatacttttcatcgactaacgaaaagaagagcaatgcaataaaaatatgctagctaaagacagtttagttgtgtgtgaaatcatggattcacccagtccttaaaatcagaaaaaaaaaatgaaatgttttaattgtgagccttctgcttaatagcttctgtggctgaaaaaaatccctgagactcaagtttccttatgggtaaaacagggatactaatacttacactttggtattaactaaagagagcactaaagacaaagctcttagtacagtatagcagtacactgtagtttcctcttctttcacctggactctcctgacatctctctgatcaccccacttacatatacagatagctcaggaattgacagaaaggagtagaagaagttgggtagtacagcaggtttgagcagaaaacagactagagtttctatgtaaaatttttaggctattgatttgaaaatcagacttccccagatagtttccagatactagagttagctatgaatgaattttaatcatttagagaccccttatgtgatagcagtttttataaaactatgctgaaggaacagtaagggtagataaattaaaacaagtttcaatggcacatgcctgtagtcccacttactcaagaggctgaggcaggaggatcacttgagcccgtgaattagcggctgcagtgactgtaatggagccactgcactctagcctagacaacagagtgagaccccttctctaaaaaaaaaaaaaaaaaacctcaaaagaagaatatgttctgagatatattttctgagatggaacaacataatttaaaaggggttatatatacataggaatttttcttctgatatattttaaactctcaacatttgattgagtttgacaaactatattgggaacctattaggtgtcaggctccacacacagtacttcagatcccaaggcagataagatgtgcttgctggtctcaaataagtctccgtggaatttagaatatttgtgggtaggaggtagtgggatgggtgaaagcctaggggaggggcacccactatgcaccaaaatagctaaatattcaatgacattaatgcaattataatataattccagtatagggtcacaagcagataagtgagctatttaattctacctggggcagaagaagcctctagggaggtgacaggttctgggattctaaagaaaatgtatatatagacccaggtaggaaacatatagtggttgaggactaaacccaatctgaggaaagatgaagagattttctgcaaaaagcaaaacagactgctgaattatgacagaaattgagagaccacattctagcataatggttttattttttttcctctcatcatatttttacacacatactcactcatacatattcttcaggagtttgaaaattgtttctcagtcttgcttttcacattaggaaaaaatgtagagtaactggatccaaatgttctgtcattctgttacacagaaagaaggaattcactttacaagaaaacaatttgatgctttgtttacatttatgtgaatattcaccttcaagtgggcctcacttacacaggcagggaggttctgcaagataattggtaataggcgccctaatatttatatttagtaggtattctgtggatggtgctccttctcatctatctctggggcatctgctttctagaattctttatggtgtccttgttaatccatcctgaattcaaatgaaccaagcaaaacacaacatttaaagtgaacaaatgtgtttaattgcttcattctgagaaacaagggaaccaagaaaggccaaatcaattgtgttacactaaaccaacaaagacttctttgcaagaaacccttgttgttatatcaatatttattgcttacttttcattagaagctacgcgcaaagttgcagccctctccagagtgagaaatgttgagacacctacaaagcaaattgccttgcttttggcttgtctgtcggttgttattttttaaaccatctatccatgccccttcccatcaccatgcctaacatagcacttcttgtgaagatctcttggtggttaaacaattcacaattattaaatgtgactttctagaagttgcagtcacctggataaacgggcttttgctgctggaggttggtagggtaaggagggtggtgagtgtttgaacagagtattgtggaataaatagttgagcctgctgtggcattctgccacaggtcctcccagatcccgtcttcttttgctggaattccctggctcccctccagttcacccaacttatcaaacagattgtttggcaaaggatagaaagaggtagaaaataaagtgaaattgaagatttgggcagacacactcctgtttctatgtagaatctcctaggctgttgatttgaaggtcttagtactccaggtactttacatatctttgggttaaatatgtatacgttgtcattttaattgccaaagttacttgaacttctacataacacagccacattttaagggactttaaaaaagaacatgtcagttttgctcctaatggataagtgcataccacaagtgcaacaccacctgatggcttctctttctttttttaagtgaagtaggacttggctagatagtaactgattctagtccatgagacatgcatccatccccattaacctgtaatctatgattgcagtttctctatttagtttgacaaatgaatcttccaaacaatgaccagctcttttggggaatgtgaagctaatgatgctccttcttttacagaactagtttgacattccaattgtgctttaaaagaaacatacgtttttaagctttttactgcatagaattagcattctttttaactttttgactattcatggacataatgaacaagctgttctatttgttgactgtggatatcctgtagcttctaggctgcacatttcgatatgcaatagagttgtaataaaatatgagcaaggcaataaaacaggaaatattgtaatatatttttgcaatgaaggctttgaatgcagaaagttcgcagatctcttcattacagttccagtggatagtttatttctcagctttcattaaaagaaaaaaaagttgtggatgtgtgattctgctgaataaagctggatataaatgaagtatctgcaacacaatcgtaggaaacatattttttgttttgctagtacttgcttatgttactcatatgaataatatgattgatttttactttatctccaactggcagtatagtcataaatctatctgtgagttaccaagtgcaggataaaatgttatttttcctcagtgtggtctcatttgattacaattgcagccttgcctggctgcattccatccataattaatcgtctctttggtttccagttgcagcgaggccagggctgtaaccgttcacatctttagacgatggtctactacgccagctggcaagtgaatggagacctttcacactgagtctaatggacgcagaaggctgaggctttgtcagggcagctctttaaatgacatcgtggcagtaaaggtccaacttgctgtggctgacagtctctttggcacctcacccttctgagtaaacaccatatgcagagaggtttcattttgccaatttattttagtgcctttcattccatgatagaaagtattctcagtggtgataggaaaatgaattcctttaaggctttacctcaggggccggatcactctctctttcctgtgtattgtgttataaaatcccattagcattagtgactgtcattttgtcataatatagatatttgtttcctatcatattatttattacttgggcatatggttgcacattactcccagggaaagaatgtgaaatatagcaggcaaaaaagttagattaagtatccacccacgtctaacactgagatttatttttgagcaagagggcatgttactactcaattattggtacaaagacatattagatgtaattttaaatagatgtatttagtacttattttgctctctgtagtgctactttaaaaacagcaaactacatgggttcgtatcatttggtataaattatgatagaatcttataaagtgtcagaactccagtccatttgtgattgttcaaaaaatatttaagccagattctcaaactcaaatatctttgggagccatgcaggttactctgagggaagtgggtcaagtacaatgatttcgagagaccaaggataacattaaggaagcagtcataaaaagggcagctctagcagattattggcatgtggggaaaatgaagaagctaaggaaagtgggtctgttacaggaaaggggtccccagtccagatcccaggagagggttcttggtcacgcacaagaaagaattcagggcaagtccatggagtaaagtgaaagcaagtttattaagaaagtagaggaataagagaatggctactccattgacagaacagccccgaaaaccgctggttgcccatttttatggttatttcttgattatttgctaaacaaggggtggattattcatgcctcccctttttagaccatatagggtaacttcctgatgttgccacggcattggtaaactgtcatggcgctggtggcagtgtagcagtgagggcgaccagaggtcactcttgtcaccatcttggttttagtgggttttagctagcttctttactggaactggttttatcagcaaggtctttatgacctgtatcttgtgctgacctcatatctcatcctgtgacttagaataccttaactgtctgcgaatgcagccctgttggtctcagcctcattttacccagctcctgttcaagatggaattgctctggtttacacacccctgacaggtttagcaatggcaccagaaatgatccttcttttgtcaaaataagccagatatctagatttttatctgacaccccttgtttttaaatgttaaaaactgcaaaatgttcaattaaaaaaacatttttaaaaagttgctatgtttaaagagggctggacctgcaagctgactttgcattgtaccaaaagtcttagaataagacattaaaaatgagcttcccattccccttgagaactatgacaagacaaggatgcctgctcttgtcattcttatttaacatagttctgaaagtgctagacagagcaatcaggcaagagaaagaaataaaaggcattcaaacaggaaaataagtcaaaatatctctcttcattgacaatataattttatacgtggaaaaccctagattctaccaaaaagctctttgaattgataaacaacttcagtcaagtttcaggatacaaaataaatctagaaaaatcagtcgcatttctatataccaataacgttcaagctgagagccaaatcaagaatgtattctcatttacgatagacactcaaatacacacgcagacacacacacacacacacacacacacagatacctaagaatacatctaaccaaggaggtgaaagatctctcctcaaggagaaatacaaaacactgctgaagaaatcagagatgacataaacaaatggaaaacatcctatgtttatggtttggaagaatcaatatcgctaaaatggtcacactgcccaaaggaatttatcaattcgatgatattcctatcaaactactaatgtcattttttttacagaattagaataaaaccattctaaaacttgtatggaaccaaaaaagagcccaagtagcatcctaaacataaaggacagagccagaggcatcacattacctgacttcaaactatactataaggctacagtaacccaaacagcatggtactgatacaaaaacagatgcatagaccaatgggacagaatagagaacccagaaataaagctgcacaccttcagctacctgatcttcaacaaaatcaacaaaaataagcaatgagaaaaagacttcttattcaataagtggtgctgggatagctggctagccatatgcagaagaatgaaactggactccttccttacaccatatacaaaaagtaactcaaaatggattaaatatttaaatgtaagacctcaaactataataatcctagaagaaaaccttggaaacaccattctggacattggttttggcaataatttatgactaagtcttcaaaagcaactgcaacaaaaacaaaaattgacaagaaggacctaattaaactcaagagcttctgctcagcaagagaaactattatatcaacagagtaaacagacaacctagagaataagagaaagtactcacaaactatacatctgacaaaagtctaatatccagaatctttaaggaacttaagcaactgaacaagcaaaaaacaaatgaccctattaaaaagtgggcaacagacatgaacagatatttctcaaaaggacacacaagcagtcaacaaacatatgaaaaattgctccacatcattaatcaccagagaaatgcaaatcaaaaccacgacgagataccatctcacactagtcggaatgactattattaaaaagtcaaaaaataacagatgttcgtgaggctattgagagaagggaacacttatgcatatttggtggcaatgtaaattaattcaacttctatggaaagcggtttggagatttctcaatgaatttaaagcagaactaccatttgacgcagtaatctcattactgggtatatatccaaaagaaaaaaaaattattctaccaaaaaaaaaaaaaaaacccacttacactcatatgttcattgcaacactactcacaatagcaaatacatgggatcaacctaggtgcctatcaatatagtggatcagataaagaaaatgtgacacatatacaccatgcaatattttgcagccataaaatagaatgaaatcatgtcctttgcagcaagcaatatggatgcagctggaggccattatcctaagtgaattaatgcaggaatggaaaaccaaatatttatattctcacttataagtgagagatgaacattgggtattcatggacataaaaatgacaactatagacactggacactaaaagagaggagggtgggaccagggtaagtgttgaaaaactaactgttgttttctatgctcacaatctgggagacgggatcattcatattccaaacctcagcatcacacaatatactcatgtaatggacctgcacatgtacccccttaatctaaaacaaaagttgaaattacattaaaaaagaaaacacatacacaaaaaataaaatgtacttcttcctttaataaatttatcaagagtatttcaccttgatgtagaaatgtaaaaataaaactgataaaaataataccaatccaattaagcaaatcagtgtgtccatgtctataaaatcctccctacacaactgtcatcagagagtatatgttttatcagttacagcgaaagtatgataggtgagtctggagggcagatcaattgcattgctttgataagctgtatcgttttcttgaacgtccttcccacccactttgcagccactgccatctaccgtaaaataatcaaaaatgaaatttccttgttgtattgtctaagtttatgcttccacataccctgctttttattttatgatactaaaaatagaatttgaagatcagcagaaaacatgatgttattaattcaacaatgtattttgcaatgtaatcactgtaaaacttagatttggaatctaacatatatactggtttaacccatgattatggggaaagttctaagcaaattttgagggagagataatgtagaaagatggtgtatgaaaattcaaggaatatgagactttagagcttttatttatttatttttaaaaagagatatagcaaatgaagacataagttcagaagttaatattctaggcagaaaaaagaaggaaataaagaaaataaatatagtaaaaacttgacaatcttgggtgaacacaaaataaaatatgtctttatttttttaaaccaaattaaattcgatgctaagctcttgttcatcagggctgcagggaagttactggggctgctgttttccctgggctttagcaaagatccaggggtctaacatacagtgaggaactcattgatgttcttctggttttcagcaccagatgatgttcttctggtctcagctttctctgagatactttgattccagcccctcatgaacccttgaaaacagccaactccatggcatcctgttcattcctgtacacaaaaatgttgctccagggctgggaggcctagggctgtggtccagctttcccaggttaccatgcagccattgcctctgaattcctctctcccagcacaatatcatcaatgagccaaggtttattttaaaagaaggtatactgtcttcatccactgagattatattcttgcccagttatcttcttggaagaggcacaggaaaaaaatatctagagtgaaatgcaaatcttaacaataaaaatgaagcaaaaataaaaataaatatcctaataaagcttattggctcatagaattttgaaatatctcagtagaaacaaaacagaactatctaggagcagaagaaaggaagcaatggtgggatggggaagaagcaacaaagaagagaaagtatatgtcattatggaaaataatggagggaaggatatagatagggaaaagatagggaagttttaactgaattttataaagaaacataaagttttatcttacctaccttaatgtaatttgttttccccacagcaattatagtacagaaaaatgataattccaaaatatttaagtaattataaatttctaatcttacagagctcttttaaaattactttcatttgcacatcacaatacagtttagagtagatatattagccagaaaacaatttctccattcaagaatttgatgcatctataagttttttttattattagaagtattaccttactattgcaaatgttgatatcatagtagacaggcaaacaagtgatcttaatgctggtctaaaagagaaactaaaatatatttttaaaaggtattaaaaatatctaaaagacattatcatggaggccacatgtatatatttagaggatgaatatgaggcataatattttggtctatagtttgggttttagtttccattatatagggactaaaagtaatgtattatgaaagattggaaagaaatgaaaaatagatgcccttgaaaactgttagatgactcagcaagacgcctcagtgatgatggaagatgcacatgaatgatgtagaagagaaacatgaagaattgagcacaattgcttcatgaaatctaagagtacgaaaaagcaatatttcaaactcttttcttttaaaaacataggttttcatttgtttgtttgttttgtttgtttgtttttgagacagaatcttactttgttgcccaggctggagtgcagtggcctgatctcggctcattgcaacctccacttcctggcttcaagccattctcctgcctcagccttctgagtagctgggactacaggcatctaccaccatgctcggctaatttttgtatttttagtagagatggggtttcaccatgttggctagactggtctagaactcctgacctcaagtgatctgcccgccttgacctcccaaagtgctgggattacaggtcgtgagccactatgcccagcctaaaaatgtaattttaaatatatgtgtgtaactaaattgatatattaagtattataagtagggttttgactcttctaaaattttatttactttttaagcttattttggagcaaaattaaataagattttttgggtatgggttttcttgcattcacacatctaaactaattggaattagaagttcatgtgcacctgaaaacctgaatacagtggaacctcagagaattcaaaatttaaagcaggagttcttaaatgagaaagtattagggaatctgttaattccctgtaacatatgtgaaacatgacttgaacacctatgcatatgtgcatgttttctggtgtgaagagactacatagctctttctcaaaagtatctcaacccttaagttaatcaagagacagtgctccaaacattgtaagttgaggggtatggtcgccagacttcctgcaggggcaagagaaaagtggggatagaatgtgcttgaatgctaatgtggccacagattgtatctccaccaaaagcaaagagtctaaagaaatattcaaagagctaatctggaaagatattgaaatacatattggagaaaatcagtgagaactagttacaaaaatttctaagaaatggtggctgttgcaatgaggtaagtagctgcattcctggtgttttgttcagaacagagcacttgctataagaaccatgaagaatcctcgaaataagaaacagtaagcttttctaggttgtggttgtgtgtaagggtgtcaagcaagtgactggaagttcaaccaggactgcagccccagaagaggccttgcctttcatcagagacggatgccaattaggtagactaggtgtaggtgccatggacacattccaggctcagattggtacatcctgcttgtctgaattgtaattaactcaagaactaggcaagataaagcttgtagctaaacaagactgaagaaaggcatggaactggttaatgtatggttctgtagaccaaagccttgaactccaatcaattagctgatgacatgatgactctaggttatacttgtttataagaagcagagattttcttattgccctaattatacttcattttgcttgttgatgtcttggccttgctgtttacttgtgatgaatagataaaataaataaacctgggtatcattgacatgtacttttttattacttaagaagataatttcagaccactagaataaatgatgaatccaaatgccagtgcatctttaggctatcattatattctatattgtgtaactatccactttcttttacaggaaaaagcaaatattacaaattaatatagataacaagcaactaattccatcatcaaatccttataatcactgaatatttgggtttgaaagtaaatataaaaagataagctttactgagatacaatgatgcaaaagtattactatagttaatgggaaaaaaatattgaattatttgactatcctactggaaatttcccttgagaaatggcttaatggtcataaaattacttctgttaggccgtaaatatttcattttcctaattaaaaatgcatgtatgaactagagagtatcacaatttatagctatatctggccaccagtttctcagaaatgtatttaacatagtcatttttcatgccttattttttccccctgtactttgagattaaatctccaaaaattctctgagagtcatgttaatactggctttcatttttgagtgaagaaaaggaggaagccaacattgtttcttataaatttgatttaaatagttaagcagccagttaagagattccagattcactgggatctcatctatgatgtgtattttatttacagggtaggaaatttcattttcctatgcttaacgtctgaaatactattattacatgaaggtatgctatatttcataaatggtttctgttttctaatgctgcatgagatttctatttttttttcttatctctttttgagttgaggatactgaacaaaaaatctacgctgggttctgtttaaattattagatcactgaaattctcagaaacattaacctgaaatacagtaattcaaataaacattagatactaaaggagaacgtttctttaaagcataatgtggtaagtggcaaccacaaatggtttagagtgtaagcatgcatacttttaccggggtgtgtatgaattctgagcttgtctctaatttattaataagaaaacactttacatgggtgggtgtgcacaaaggaaatgacgtagaaggaggaatgacaagatgttgcttcaggatatctgctagtaatatagtgtcaagaatggcttgatgataaaaataaaatggcttgaggaaaacaatccttgttttccctgtatcattaaagtcatgaatcactgggctcattagagcaaagaagctattgtaagaatctagaaggaaaagagttggaggagtttaaaagaaaagcaaaagaaacaagaggaaaaaaaggcaatggaaggtttcgggagggagaagagtagtaaattgcctctagttctggttcctggaagagaagcaggacccatagtggcaggcacttttgaagagtagcccagactctttaagaagtaaatttcacaatggacagtgagaggcaggatactgttttaggctgggggtatttgaagattcataatggccattcgcattacataaaatttgattaagatatttttgtgataattaggaaaatgtaataatggcttagaatgttggataatgtatttgggttgatgatgatgtcttaggattggtgctggtgttgtagttatataggaaaataatcttcattttgggaggattcattctgaagtatttagtggtgaaatgtcaagatacatattgactacttttaaatgctttgacaaaagagaagtatgtgctatgtacagaggagatggagcagttgtgacaatttttacatctttgaatgtaatagaaagacatatgattgttatgctcttctgcttttgctgagtttgaacattttggaataaactaaaaataaataaataacaccgtatcccatgaacaacaaacaaaaggtgctggagaagatagtatagtgagatcacatatttattgttgcttccttttgtgaccgcattgaaataaaaatgaaatgaatgtaaggaaaatgtctgcatattactaacttctagaatcagaaagtgcatggaaaaggggtgcttaatgatgtgtagaggaggaagtcacacctagaatgtgcatgaaggggagacctactctgtctggagatcctctggactcaattaccatggagggtagaaataggaggagagactttaaatctttccacttttcatgtaagaattaccccaaactcagcacttactgacaagcagaactattagggaactactctgaaaagaaataaaaataataagtatgattagttaatgctggtacttcaaaatggagccctaattattctggcattcgagattctctagcataagagctctctccctccccgttatccataaagcaaatgcaccaattaattcctgcttacatattcagaactctccatcaataatctagtgttacagtaactacaaacagaaaatcaagaatcactatatatttgatgagtgcttgcaaaatgaaaaagtacaaaaataaacacattttaaagattactttggaggacaaagaaaattcataaaacaaaagaagattaaaaataaataaggaaacaaacaacaaatcccaaatatttaatatttactcttagagagattcaaggagaattatattcttaaaataagaacaaaatggaatgaaaagaaagagtcagaaatacaagagcccttaaacattaaaacatgagtattatattaatatattaacgttaatgttgaaagataaagtcaatggaattatcgaggaagtcaccctaagaagtccagcatgttagtgactggtattctagaaagagaaaatgatgagagaatactatcaaagagatattaatattactactaatggtaataatattactgataatactcacattgcaactgataatactaatattacaaccaataatgcaaattgtgcatcccaaatacaaaaaatctgaaatctgaagtgctcccaaatccaaaactttttgaccactgacatcatgctcaaagaaaatgctcactggagcatttcagatttcggatttttgaatttgggatgctcaaccagtataatgcaaatattctcagattcaaaaaagatcccaaatcaaaaacagtctggtcatcagcattttggataacgaatactcaacctgtaataacaataataatatgttgccctactggttaacaaatatattaactaatttaattctctcatcagaaaagttttaaacaattacctgtggcttgaaggcagtacagtggtagtatgatgccagagtgtatgcccttaaccattactgaaaaacattagtcattaagttgacaggaccattaagtgcttaggccagtaattttaagcagtccaagaggacaaaaaaaatggtaaaatttcataacatcaaggaaaaatgacaaacctgtaagtttccaaagatggagaagaaaaatcaacaacagctagtcagctaaaatggaaaaagtaatcagaaaggtattatatttcttagtacttaaccctaatgttggaagacaacattcaaagttctgagaaaaaaagtacttctggacttagaattttatacttagtcaaaattttacatatgagtaagagaaaataaatagatttttagacattcaaggactgtagtatttaccctttcttaggaagtttcattagaatgtattccagcaatataaaaaaagatatatctgacaaaggacagcaatatgagggaatgatatatcttcaaatatttaaaagaattctgaagaattcttacaactcaataataagataatcaacccaattaaaaatgagcaaaagaattttaaacaggtacttcacaaaaggagatctacaaatgaccaatgagcatataaaagcatataaacatcattcattattagggaaatataaaataaaaatggctgtgacttaccattacatacccaatagaatggctgcaattaaaatagtgacaatatcaagttttggcaaggtggtagagcaattagaactctcatatttgctagctgggttgtaaaatggtacaactactttggaaaacagttttggcagctttgtattaaaaaaaatgcagtcccacaagtctactttagctttttaaccaagataaacgcaaacctatgtcattacaaagaattatacatgactgttcattgagcattattataacagtcctaaagtagaaacattaacaggtgaaattgataaacaaattgtgatacagccatataactggacaaactactgatacaggaacaacacagttagatctcaaagatagtatactaagtggaaaaggacagacacacaagaatatgcatggtataattgcatttatatgaaattatagaaaaggaacctctaatctgtagtaaaaggaagtaattctatcttgcaggaggtgcaagggattgaaatcgagtgtgcataagggaatttttctgtgtgatgttgtgggtggtggacatttgccagctttatatatttgccaaaacttgttgaactgtgctaaagtggatacattgttgtatgtaaattatatttcaatagagttgattttaaaaaagaggaaagcatgagattcaggaaggaatatattccttcaaatattagttaagggaagtcccagaatggcaattgtatagacttggaaaacagtcaaaattggagcagagagatggagggttcttcaggaatttgtctagaaaaaagtgtaataactagaaaagaaatatgactaagtacttgaaaaattttttatttatttgatttttttgttttaagttctggggtatatgtgcaggatgtgcaggtttgtgcaaaaatttaataatgtgcagaatgcagttagtgggctgtaaaaaaaaaaagaaagaaaaaactcatccaactgaatttaatgttaagtacattctccactgaatggctcaactatgtaaacattgtatgatgatgttaatactgcatattcaactttagaggatcatttttaaaaatcttgacaatgccaaaacaaatgcaaagctgacataggttgagaggtagaaacagttgagtagaaatgaaaccaagaggtaaagactattgttgataaacaagaaatgaaggttcaagtatgttttttgaagctgttgaggttaccagtagaaggaatgagaataatgttcactatttggggtggaaaggaaaggggcagcgggagatatttaaataaaataatccctagctattataacaatcaatagaaaatgtctacgttttttaaatcaagaaatagcagagtaagtgaactgggttgaatagtgtcctccaaaatttatgtgtacccagaacctcggagtgactttatttgggtctttatctgcagagtctttgccaatgtaagtaagttaaaatgagggccgggcgcgctggctcacgcctgtaatcccagcactttggggggccgaggcgggcggatcacgaggtcaggagattgagaccattctggctaacatggtgaaaccccgtctctactaaaaatacaaaaaattagtggggcgtggtggcgtgcgcctgtagtcccagctactccagaggctgaggcaggagaatggcgtgaacccgagaggcggagcttgcagtgagctgagatcatgccgctgcactccagcctgggcgacggtgggagattccgtcttaaaaaaaaaaaaaaaaatcatgttggactagggtgggccttacatccagtgaatgatttccccacaagaagaccctgtgaaaacacagacacacagaagacacacacagaggaaagtcagtctgtaaagatggaggcagaaattggagtgatggaattggagggtagggagaggcaaacaaggatatttttccttagagccttcagtggggagcatgaccttgccaaaacttgatttttggatttacagcttccaaaactgtgaaagaatgaatttctgttattttaaacctcctggtttatgtaatttgtcatagcagccctagacaactaatatagtaatcataaatatgttttttaaatagatatgagagtaaccacaagaagaaacaaaaccagttaaaagtcactgctactgggaagagcatttgtaaggagggagtgatagaacagatttctcttatttttcttcatcaaattatctgcacttgaaattgaatacttcaatgtattactgaattagaaatttttttaaaagtagctaaattaaaaagtttccaggtcaaacataagtgtgtggataattaggtagggagtttagatgactgaaaataggtcaaattcaatgtgaacacaaagatttgaacttcatataggactacgtatcccaaagggcacaattgtgtgaggtgataggtctagtaaaagactcaataactaagttgaattgctctaaagactcgttttgtaataataaaaagaactgaccttgatttatgttactaagcgtataatgtggtaatgtctcctctctaagaaacaaatgaaaggccaaagttctgagatctccctcccttatgattcagctcttttacagaggaaataaaaagaattgaaagtaggaggagagtgcctagtgtttaagcacatggaggaatcagcctaagtaatgttctttttgcctttgctggctccaaaagagtctgtagagattgtagatgtctcctgtctaggagtttcctcaccttgattttgctccacctcagaacgtttccaataatcgcaaacccaagtcagtttcaaatggctttacatgaatcagaaagtgaatgactgatatatacatgtgaggtagatacatgtataaaaattagtagctgatgggtgacagaatcactgactaagcctgattaccaccagagattctgattcaataggtatgagatggaggcagagaagctgtatttttttttaaatgtcataagccatatacaagtaaccaaagaacagattttaactgtcgttttgttttttttttgtttgtttgtttgttttttgagacagagtctctctctattgcccaggctggactacaatggtgcaatctcagctcactgcaacctccgcctcccccgttcaagtgattctcctgcctcagcctcccaagtagctgggattacaggtgcctgccaccatgtccagctaattttttctatttttagtagagacggggtttcgccatgttggccaggctggtattgaactcctgacctcaggtgatctgcctgccttagcctcccaaagtgctgggattacaggtatgagccaccacgcccgaactttaattcagtctttatcagtcctgcaactccaggcaagagctctgcttcagttctctcacttttggaaaatcagccaatccctaaactgctcgcttcccccaagtgtgacatattaataaattggcttttggctttgctcagagggactgtgttctccaagcacggttttcccttagcaagtaagaaattcaactttgtaatagatactatgagaggtgtagtcacttcccctgacaatcgtcaaatgattctgacctctgccttcatgttttttccagagttgaaatgtagtgcagaatcacctagacaaatggtctccaagccaagcccgttttcctttcctgattttgattcaatggactcactttacactcccatgtggtagctgcccagggttggtctcagcacctatctctttacatggcaaaccttgtgttggtacatggagaaatgagagaaataaggacaatattcataaatcaggtcaagtttattgaagtaaataaaaatgatccccagagtgtgtaatataaggggttattttctggaaaaattctatgaaaccatcacatttacaaggtattgaaagttaagcattgaatacaaaattcaagggatttgttgaaagaaaatattttttcttaaagcataacttaaaaccgtgcattgttttgtaagtagaaaatgtccttaaaagcatttagagaaattggactttatcaaaattaaaaacttttgctcagtgaaagatcctgttaaaagaatgaaaaggcaagcaacagactgggagaaaaaatatatttgacaaaagtcttgtatctagaatatgtaattttgaaatgactttcaaaattcaacattaattcaaaaaaactcatttagaaaatgggcaaaagataggaataaatgtttcaccaaaaaggatatacagatggcaaataagcacatgaaaagatgttcatcactagccattagaaaaatgcacgttaaaaccacagtgagatatcaccacacacctatcggaatggttaaaatcaaacagtggcccaccaaatgctggtgagattgcagagtaccaggatcattcacgcatcactggcaggacagtaccaatgacataggcgttctggaaaatagtttagtagtttcttttaaagctgaaagtggatgtgccatagagcccagccattttcctcatgggtatatatcctagagaaatgaaaacttattttcacatagaaactgatacgtgaatgttcagctttatttgtaatagcctaatactggaaactacccgaatgttcttcaataggttaatggttatagaaactgtggtacatccgtattatggaatactaatcagcaataaaaagaaatggtctgttgatacatataataatctctatgaacttctagaaaattatgctgaatgagaaaagccaatctgaaaaagttacgtactacatggtttactcatataataattgctaaatgacataattacagctctgtgccccaaaacaatgattcgatcagtgatggactgcatatatgatggtggtcccataagattataatggacttgaaaaattcctgtcacctactgtcatcatagccatggtattgtcatagtgcaatgcctttactcacctgttttttggtgatgggggtgtaaacaaacctactgctctgccaatcctatgaaagtctagcacatacaattacgtacagtatataatacttgataatgataataaagaactatgttactgctttctgtatttgctacagtatatttttgtggttattttagagtgtactccttgtacctatttaaaaaaaggtaactgtaaaactgcctgaggcaaggccttcagaagttattccagaaggtcttgttatcataggagatgacagctccatgcacgctatcgtgtattgtgtattggacagtatgttctagtctttcacattcactcaccactcactcatgacttacctaaggcaacttccagtcctgcaagttccatttgtggtaattgacctctacaggtgtacaattttttatcttttatatcatattttcactgtaccttttctatgtttaaatatatttagatgcacaaatacttaccattgtgttacaactgcctacagtattcggcacagtaacatactacacaggtttgtatcctggaagtaataggctgtacatatatagcctagatgtgtagaaaactatagcatctaggattgtgtatgcacactctatgatgttcacgcaatgacaaaatctccaaatgacacatttctcagaacatattctcgttttaagtgacatatgactgtgtataaagagagagaacagattagtagttgccagggtttaaggatgagggtggtgggtgtggctataaagggtaacacaggggcgttttgtggtgaaggaactgctttctatcttgactgtagtgatggatgcatgaatctacacacatgctaaaagtgcatagaaccaaatacatacacacacaagtgcatgtataactggcaaaatctgaataagctctatggtttgtaccaatgcgaatttataataatattgtactatagttatgtaacatgttaacactggggtaaggtttatgcacccgaagggcacacatgatctttctgtccatttctttgcaacttcctgtgaatcgataattattttattttattttattttatttagacggaggagtctcgctttgtcgcccagggtggagtgcagtggcatgatctgaactcactgcaacctctgcctcctgggttcaagtgattcttctgcctcagcctcccaagtagctgggattacaggtgtgtgccaccaggcccagctaagtttttttgtatttttagtagagatggggtttcaccatgttggccagactggtcttgaactcctgacctcaggtgatcaggtggccttccaaagtgctgggattacaggcgtgagccaccctgcccggtgtataatcattttaaaataagaagctaaacattaatgatgtagctcgtttcaaagtctgagaagtcatttataattattggaaattaattaatccatgtttaaaatgtattgctttgggcaggttatgattcagtagcttaaaaaaataatccattacctctcaaaaaataccactccgaaaaactgaaagatagacatcagctggtagagatcttataacatagatcaaatatattagaaaataaattttaaaaaaaataaacagttcaaggtaatagtataaaataaaatattattatttttgtctatccaaaacttaaaagaaaatattttgatttagacatcttggttgccaaatatcttctcagaaaccactatctgttattgtagattgtatctttgcaaattcaaaattttactttaaggcagagtctccctctgtcacccaggctggtgtgcagtggcacaatctcggctcactgcaacctctgcctcccaggttcaagcgattctcctgcctcagcctcccgagtagttgggactacaggcgcgtgccaccacgcatggctaattttttgtatctttagtagagacagggtttcaccatgttagccaggatggtctctatgtcctgacctcatgatctgcccgccttggcctcccaaagtgctgggattacaggcgtgagccaccacacccggcccaaaaattttaaatattttattttttgtttgatttttattccaatttagttttttaaaaacatagtttaaaaaataatttttattaaaattcaaaaatcaggaaactgctgctctatctagtgcacgtaaaatataatttttttttttttttttgagacggagtcttgctctgtcgcccaggctggagtgcagtggtgcgatctcggctcactgcaagctctgcctcctgggttcatgccattctactgcttcagccttccgcgtagctggg

SEQ ID NO: 3142 - DNA, 2137 bp, Homo sapiens
gtcactggaaatcagccggcctcagaaagtgtgtttgtgtccatttctcccagcgcaccctctgcatatctctacccacttgtacataattcagcatccagcagaggaaaacaaagtgttgcgtacagttcctctactagcagcatgcctcccccaggacaagtgtaaagtgaagatcggtcgtcgcttcagtgaagaaagagatcctgaactttcaactgtttgccggaagtctggtacattaatattatatccaggggctgaagctgctaatttggaagaatttatattagattctcctgtttatccttctacaatcatcatcattgatggtacatggagccaggctaaggacattttctataagaactccttgttccgacatcccaaacaggtaaactagtaattttaacagagaataaatataaatatataattaggtatattgtgtatgttttctgtgaagggatacacatagatttttatatatgaatttggtggtatttctatgtgtgaatatatagtacctagatatatgtatgcttatgtttatgagtttgaatatatatgtattttgaatatatatataaaatttcaaatttgtcatttcttctctcctactgccaaattttactgtagttgaggcatttggctatattaagagtctcttagacatttaatcagagaagtctaaggattatttttatatgtattaatgtgttttgttaagaagcattatcttatttaaatactattatttggttactgaattacctagttcttactaggaatgactaagtttttattaaatactttttgtcattcattattacagttatatggtttattcttcagttttttgatgtaattaattatgaagacacctttcttaatattggtccattcttatattcctggaatggactcaactgagtaaactattaaacatttttgatatattgctgaaaattatattttatttagtggcattgaattatgtgtatttttggtccactgtcatgtttggttattaaaataatgttaacttccaaagtaaattggagagattttaatatttttctatgacctggaatagtttaaataatactagaattccttgcaccttagaaattagatggaactcattggtgaaatcacttggttctgttctctttaaaaatggtagcttttaaattcttctttcaaactcttctaaggaaattattcaagctttctacttctatttagatcagtttttaataacttttatatttctctagggaattatctcttttctctaagttagcagattggttgccatatacttatatacagtcttaaataattattttaattactcaggaatgcatttttttcttgtttttaatcatacacacacagacatagacacacacacatacacaaacgttttttacacaaacagattcaaaaggggtttctctattttatagaacttttaaaatataagcttttaggttgtttatattggctattatagtttatttttatttcattacgttgaacttttttctcgaccaattttatatttcatctttttgggcttattttcttctattattcttctgattttataagatttttactaagagtacttctgtagactgaattgtgttccctgtccctcccccgaccccatgcatatattggagccctaacttccaatataatggtatttggagatgggacctttgggaggtgattagattatgaaggcagagccctcatgatgggattagtacctttagaagaagagacatgagagatacttcctttttgctctctgtctctctccgtctctctttgtctctctctctctctttctctgtctctctctgcatgtgaggacacagcaagaagacttccatttgcaagccaggaagagagctctcaccaggaccgtgaccatgcaggtgcaattaaaaactagcatttctagtcagtatgtaattcggatgcagccgactaatagatgcctttctacactggagtgtgcagctgttgctctttccatcttggagaaaaataattacatacaagaggtatgtttcctgggttcagtgtttcagaatacagtccactgtggtgactctgtaaa

SEQ ID NO: 3143 - DNA, 8849 bp, Homo sapiens
gttaacatctgcccagcataaggcctccagcaaactaaggcaatgctggggctctgcctattctcagtggttgatgccatttttaaatataaatttttttggtcattcttacccacagaaggactttacagcaagaatagaagcaagctgaggtgtatgccagatgacatgacaggtgctaatgatagagatcaaagtggaaggaaaggagtgaattctccctccaggtgccatagatgacatctttttagatggatcttttgtttcgcctttaaggtaagaaatgaaaggggtggctgatgcatttagatgaaacacaaacaagcatgtttgattgtttgatttgtttgaaaagttgtcagctttataaccatgtggctgattttcttgaaggacagagcctatacctgcccctctgcctagccctacctacaaccaaatgaacactttaagtagcctccatgctctgtgggtggttgccttaggatttgatttccttcctgcataactgttagggaaacacattttctcagaaataaatccccaccataagtgtatatatgagttgagcctgtaaagttatgagatgggatttttcttgtggtttgtggaatcagttttagaagctgaggaaacaacggaggtgatttaggctgcccagatggataagttgtaagagaatttatgtgatgctgagatatgtgatagagttgagatgatgtaaatgaagagattttggaaagtagaaagcactacataaagatattccaactcagagtggttaataatcactatgttattcagcacattgactaggaattaaattattttatataagccttgtatttcaggttaaatgttatccaagagagcattttaggaagtgatttctatttcatctggagtagtcttctggttttcattatgattttaatattattgacaatgcatatttgttttagctgaggaggatgtacacagtgtaacttgtacctttttccagagctgttgcaatgttctacaggcaagcattaattcaactttgctaatggatataaaggcacagaaaagttgagagtgcttcttgatgtcacacagcaaggcagcagcaggataaggttaggacacagaagccttgaccttcagttatgtgctcacaactcttgaacattccctcttttactgaacattttaaaatgttgtatttatacttcaataagggcctaattaaataaattagagctcaattttcagcttataaattcttctgaactgaactccaagtagagccaggaaatgatcacactagctaatagatacagcataaggaatcatgctattgtgcttattaatatatggctgacaatgaagataatcacaagtttatttatttacttttcattaaaagtttctcatataactctgtaataccagatattggtatattcatattctgggaacacatacgtttaagtgtcattctgctttttagcaatgatttttaatgtccaaatgcccagatatttctttgggatgtgcgttcagaatcttgaaaagtgaatttgtaggtagttgtgaacatggaagtaaggtagcattgggagttgatgtctgaggaaggtatctttaggaaaatggcatcaccaactctggctgcaaatatatttttattgttgcttgtgatgcaattgtcctggacagaaggaatttctatttacactcaccaaagagactgtagcagagaataacaggggtactgagtactaactaaccaagagatcttatttgtatttatttatttacttacttacttatttgtgggcaactggcatagtttgttatcctgtagggaagttctgtcagttatcaatgtgtttgctctactttcatgaatgagtatacaacattcaaagcattcaaaattaacatggccatttttatattattattcgtttaagaataaaaacaataaagtaaaataacaataatgaattgatgtcactgacactatttggcagggatggggtggggcaagaacccatctggttgaatgagggtaatgttacattattactttgaaatattaacagaaaagtttgggggataattaggtacacactgcagaaaactctctggattctataaacaactatatgttatactactttgaagcatcttgcattatatttgtcattgaggaagaggaaattattataaattatgtgtttataactttaaaatagcttcaaacacaactagtaatgatataagtaaactaagctgaaataaaataaaattgtatatttacatacatgcatacatacatatatttcttctcttaggttgagtcatctttttgaaatgttaccttctaaatcatactaagaacagcatatctttaggttatggtttattcttaggaaagttacaagttacattggttttaaaaatataatattcccttttcttcataatcatttcacttccactagctaataataccaaagtatataaatgcccatgtttcaatccttaaaatactgttgcctcaaatgaactccaaaatatacacatgtctatgctatcaatcaaagatgaaaatgttggtattgataggccctactccaatgtatttgaaacttatcacaattacatttttaaggtgtttgcatctcattgaacacttgcattctaatcaatagtctctcaaaacgtgtcaacagtattgatatgtattttggtcctacgtgctgctcggaatttgggaagcacttatttgactgtgaaatggcaaattggtgcggttacttttgtgaaccttttcgtatgccttctcatttccaatacaacaaatgcttgtatgtcacacctgatgtagcgaaagatccaaataagactctttaagttttcaatgtgactgtcatgaacataataatgtgttattctttctgcttcattcacaactctgtagattgagggatcagaatttagctggacaagatgcatacaatatatgagaacacaatttaatttgtactacattgactctacactgctgactaaaaaaaaaaaaaatcaactgattcacatgttaaattcatttatccaaaataaaaatgcacagtgaggccaaaagaaaaaaaatgcttaaaaaagattcaaaacgttaaacaaattgcttttaattataataaaaactgcccaggttcctctaacttgtcacttcaaacataattattaaggtcatctgtgctgcctaaagaagaaaagtatatcaaaattactgagatcagctcctgaattgagcatgaaaacttagactctgactgtccaaccaaactagccaattctgaaagaatgccaaaatcagttgagagcaacaattaattaaacaaatatttgaacaagtactaaaaactcttcttttggatggattttttcatattgttataatggtagggttcttgatacaaccttagtttctgatttttctaaatatgctagtgagcactatggctttgcaaaacccagtatccatcacataccaaggaggtataaatccttggtccccacctaggatgtagactatcctcaagaaccagagctatgaatcccagtgcatttttagatgaggtggaggtggctatgcagcaatcctgatggtttgatgcactactcacctttgatgtcaaaccctacatattagctaaggtatttcatcaaatgctccaactttaatggattttctccctttccaagacaagttttgagaataacatcttctgttttgcaaaagcctggataggtttaaaaaatatccatttgcttatgttagctttttgcttttcatagcaaattctctatggcaagtatatcatctagatgactctgagtgtatgagtgtgtgtgtgcgagtgtgtgtgcgcatgtgtctgtgtgaatgtgtgtatgctcacagacagatattttaaattactcttttcctcaaattctaagaaatcagaagattaaatgatttaattatatagcctcctatttccccaaatcttataaaatgtcaacatctcctatttggtctttgcaaacttgatctctctcatccttaacccatttatgaacatgtctattttgcttggaccttttggagctgaccatagtcacacaaagaacctgtttcttcggttagacatgcttttttacatgctggtaattattaggtgataagagattaaattagagaagtaaaaagatgaagtttggctagaaaggtgttttgttctgtttatttattttaattttatggaaattaaaaggtaccaacgactcatttcgtgctccttaacattgtggactgccttactggagggttttcccttgttctcacattacacacatgcacatacacgcacacacacacaaactagatgctcagttactatttatagactatcatctgccagggtctttgaaatttctgttttgcattaaagacaaagaattcctctttctgactgctcattgagggtttcctgatacaagaacataattaactctttgctggcctaactaatttctgcattttaaaaagtagccagatatgacaaaagtggagcactcaatccacagggtggccattaactgcactccgttactgtatgttctcaattcagaccacaattactgtcagggaattgcactggaagctccttcttgtacgcaaacaggaatactattcattaaagagcactttcaataaaatacaatctatattttttaatgaatatttgagaaagaaaatacaatcttgggttcagaaacctgcaatatggttattattcttttaataacatagactttctcatgtacatatactgacagatgtagaagaaggaagcagaaatgagatggcgggctttaactcagaaaaaatgaaaaagacgagccacagtaaactaagtcaatgttaaataaggatttcctcaaccacctacagcagacacagctttctatgggttttattgatgtccctgggacagtagattccacttaaatctttcaagcccagttaaatatgagaacatgaggcacttcagagactgaaagaaccaagaagcccatcaaagactatctcctgctctaaggatttgccactccacaccaaattcttttccctgttaatgtatttttaattttagtgactgtagttttcatattttcagactgttggttctgatgaaacacctagttgcagtccctaggaaatgcttaatgcccaaaattgcctacaattatttccttttaatgaactttaaatatgagtcagtactaaaaaaaaaaacaaagacagaaatagcagtgtgtgtgtgcatacacacatttataggtacacacacatatgtatatacacatatatatacacacatatatttgtaaaaaaaaataggctagtaggctttttaaatgcaagagtagtttgctctgatagcactcctttggtagtccagctacattgccagttgcttcagagagcaaaagaaacactccatagactgagagtgtttcttctttgacaaaaaaaaaatgccaagaattctgctactcaaacaaaccttccattgaaaatctaaattgcgctttccagaaaacaactggattacaattctttaaggaatgaaaaataggtggaaataacctattaaagtacaataagctgccaagggggaaaatgcaacatcttaaagaaaaggcagatcactaatttagagtctcctaaagaaaactcttacataaagtcctgaattcacattgggttatatcatttaaaatcatatcatgcagcattcattccctgactctccacaaaagaaattgaatgccagttatcaagattattatcaatatcctggtattagttttgaagcatgttttaactaataagatgatgaataactgtgaagtaaattcccccaaaatgaacactgtgtttcctcccttgtgtttttagtttggttacctaggagaaccagagttcgataatacactgattgaatacttgagaatagggacatagtaaaaatatctttcaatatttcctaaagcaggttgtttctcctcttgcctatcattggcaaatggaaaaggatttagaatttcagagacagcactttgctcatgtgtgccagtcatgcatggagtgaaatgtgttaacctttaaacaatttgggagtggatgcagttaataggtaagacagatagttataaagtcctgattaactacagagcgcatagacatgtggaaacttgtatatgggtgaaagggaagagacagcaaagattatttaccgttctagagaacaggtcctggggaacagaatgaggaaattctgaacagcaacattgccctcttttggtaaaacagtgtacaatgtgtttacctcacttgcaggtgaaagcatttcttcaggacacagacattttccacatcaagaaaaatggcacaaactaaaacaaaccgcagagagggaaagagttcacctatatacctgtaaggtggacggaatttgcatacagagtaaagacacttgaagtgacaggctaacaaagaagcttttagactcagtctttctggggtccagtttcagtgactgctggattatttaacccttgtatttatccttgactgcttcaagccgtctgcgttgtaatcagaatcatgtagcactcggaatgtgaacaaataaaacaggagctagttctttttgagtccccagtgcttaaatacgcaggcagtctgcagtctgagcggaagtcactgaataaagagccgtatcccgcagaaaagacgtccccagcagtttgtgctttgtggctctaatgaagcctgcgatgatttaggacagtgaaggaaaggggcttgattgcatcaaaaaagaaaaagaaaactgtcaggacgagacacaatgttaaactaattacttttattcatgctgtaggtgccaacggcactctttaaataatactaatttcaggcttgtctccatctctaatttcctctctgttttccaagttagagtccttctctcgctggatccgtgttacgggatttttctacgtgatacttctggaacttaggagtgtctagtgcaaatgcagattcattgaaccagtttagaagattatttattatatttttctcttcctgactaggaaattaatcaccattcctgctagtcacctttgctagcttacgggctaaacatatttgaaggaagttatcagttccctttaatgatcacagtcctttcagggacgaggacaaagcaagttcatcttcttttcctcaatagtttgagaaaaattctacttcatgaaaggaaggtagcattatggtccattctttagcatttaatttattctccctaaataaaatactagtaaagagcaacgagtttctgcaagtgaaaatataactgtaaaataaataattacagtcctggagtaggaaaggtaactcagatttgtatttgtaaactgatttttcttcttcttttcattctgtgatttggaatacctggatcattatgtatatgctatcattattttcagagtagggtttgacaggacttaagagtttaatgtttaggtcacattttcttcagagtattcatttgccaaaacaatgctggaatcacttactataccaggacattgaattacataaaaattctgaaaaactcttttgagatcttttgcaatcaatttagaaaaccttaagtcggttaatgctatcagtgctaaaagtttacaaactgcgttcatataaatcatcttattttatctttacccagtaaggtacttaaagatctattattgccttcacttagcagataaggaatttggagatcagagagttaactaagagcacacagaatgttgatggtggggttggactcaaatccagagttctaaatttaatttttgtgctcttttacttttcctcatatgtgagcttgtataacttatttctctacctgcctaaaggcaaagctaatagaaatctagccccttaaagcctccaaatagcatgcagaacttgaaactaaaatgtataaaaacattttaaaaatgaaactgaagttgggccttcctattcactcctgtttagacagatttagaactccaacattatcttaatggaagcacatttttataggaaaccacattccatgaggtgaaaacaaagtttttactttctcaattccatctacagtatcagtatgcttcgaagcaacaaataaatctatccattaacatccttattctgtcactatcaaatggatgtctctcccacatccagtggcacctctctaagttgtagctatcagcctttgcaggatttgtacctgaagaaaaggaagctaatcttccaatggcaggattcgaggggcacacaggtggcaaaagcaattctataggtctgccaccaaacacaaacagcactacaggtaagccttcctagaccgtattgttcagttagaccgtattttcactgaattcccctttgaacctaaggaatttgcttactattacctgtagaagaaaatgtccttgtgcaaatttctcctggccaaaatatgcaagactttattatagtaagaaagagccagttccctatagccatctatgtctttctgcatgaatgtgttcattgacctttgaggccagcaacataattggggagtggggggaaaagaatattatttcttctaggataaaataagaaaaaaaatcagtaagtttgctgctttttacatctggaaagagaaagaaacaaatttttcctgtctctg

SEQ ID NO: 3144 - DNA, 22650 bp, Homo sapiens
attttacttgacgccattctgaatgggattgttttcttaatttctttttcaggtagctcattgttagtatatagaaatgctactgattttcgtatattggttttgtatcctgcagttttcctgaatctacttaccaattctaacagttttttttttgttttctggtggaatctttagagttttccatgtataatatcatgacatcagcaaacagtgacaatttcccttctccctttcctacttggatgctgtttatctgtctatttatctggcctaattgttctggctatgggcacatagatattttgattagccccaaaattcacagatttccaaaggagtagagtttgagtggtgaagctgattctttcactggtattttcatattttgcatgcgatggagactttcatattattatttgtcatctgagatatgacaaaccatgagggtgtggtatgaacaatatggagtactgaaatgcattaaaaaactagagcggattgatggttgcagttccacaagatcattttgggtgatttgtggaatggcaaatggaaattatgccacctcagtgcttggttcccaggctagggaaagcctgtcatagttggtattcacattactttcaaagttgaaacttcagtgctaagcaaattttggattaaaataagatattagtgggcagaagaaaatatgtcattcactgggcacttactaagtgccagacattgctctagggcttcaaggtccaatgcagtagccactagatacatgtggatattaggcacttaaaagggggctagtgtggctgaggaactgacttttaaattttgtttaatcttgattattttaaatttaaaacactgatacttggttcagtttttggaaaactttaagtacttttggaacaacctgggtatgtgaatctgttttttcaactgaaaatcttaagaaatctaaatatagatcaagcatttcctatgaaaatttagtgtccaaattaaggtgtattgtaagtgtgaaatacacactggcttttgaagacttcatagaaaaaaaatgaatgtaaaatatttcattaacataagcttttctactgattgggttttgatatgataatattttgaatatattggattaaagaaaatatgttgttataattaattttcccagtttctttttgcctttttaaaatgtggctactagaaaatgacatatgtggcttgcgtgatatttctattggacagtttctttctaggggctttgacatatgccattttaccaaatcattaaaataacccagtatggtaggcactactgttcccattactataggaaaggcaattgagtgaggctcagaaaagttatttaagtctctcaggtgttacatttcttatagagcaaagccaggattcaaagccaggtttggatagccccacttcttctttgtttctactctgttgtgttgttcctggttgctttcttttaggaaagccatgaagagcttgcagttctgtcttgattcttcgtaataaataagacctgatgaacctatttatgaacaggaggcagtttgaaacaaaaattaccttctcttcaaatggtacaatacattgtcccagtttgtgcattttgatgaagttggcagttgtgtacagttgtgtaaccaatatcacaatcaggtaatttccattacttcaaaaggttttttcttgtccacttgcagttgattacctccacagatgattactatgcacaggcagctactgatctgccctcttatcacctttatgcttgacttatttcacttagtatgatgctattacaattcacgcatgttggtgcatgtacctgcagtttgttccttttcattgctgaatatagtccttaatatggatatgtcacaatttcttttttgtactagttgaatgatatttgtgtttccagttttggcttcttaataatgctgctactatcattcatatatacataagttattttgactcaagtgacacaaaatatttatcttggataaatgtctaagataagtaaacatttaactttttataagatactgccaaaatgtttttaccaaagtgattgtatcactgtgcaaatgaaaccagcaagttatgagatactagttgttctacatcctcaccaacactttgtattgtctgcctttttaatatttgtttccagtgagtgtgtagtgatatctcattgcaatttgaatttatgtttctctaatgcctggtggtatcttttcacacatgtattggatgttgatcctctttcatgaaatgtctgtttaaatcttttgcccattaaaaaaattcaggacggtcttattattgagttctaagcattctctatatgttctagatataaactttttacctgatgtgtgttttgaaaatattttctcccagtctgtgtctggcctttttgctctcttaaccatgtttaagagctcatgtttttaaatttagatagaatgcatctagtttatttttttcttttatgtttgtattctttgtggcctgtttaagaaatatttatcttacccaatatcacaaaggttttctcctttttttcttttagacattttatgatttgggcttttactgttaggtctatgatgtatttcataatacttgtttttttttatatgttgccacaggcgggggaaaaaaaacggcttggattttgtttttttttccttgtgggacaagtagttgtttcagcaccatcttttggaaaaaacttcccttccccatataattacttaggggtaattcaattttatttattaacaaagatactttgatactccttctgagttctgtctcattgatctgtaggtcttaggtcaatatcgtactgcttttataagtgtagctttaaagtaagtcctaaaatcagacaaggtaagtattccaacttaaaaaaaatttttgcctattctaggtcttttacctttctatatgcagtttagaaccagcttattgatttcttctgagaaacttactaggataatcatgaattgttgagtctattaaaatgaaaagacattcgatctagttaggtctatattttatgattcatttttattaatctccttaatattgtgttcctcttccttctttctagctttttggagattatttgaatattttaagatatattatttatttttttcattgggttttgactatatggttgtcagtagttgtgatactgtagcatagatattcaagatgttatccattggagaaacagtgattgcaaaataaaaagtttaacctctaaaagacaatttaaaacttgaataggtagattatagactgaaagaaaacatttcaaaatatgtactggcaaatgatttgttttcaagatttataaaaaaagtcctatagttctatgataatatgccaaaatgatctgataaaaagttggcaaatgattatcagatacttcataaaagaagatccatgaataaccaacaaacataaggaaagctttccacatcatcagggaagtgggaaaggcaaattaaaaccatgatgaaataccactacatacccaccagaaaggccgaagtaaagaagattgacatcaaatattagcaaggatgtggagtaaccagaactcttagacactgtgagtaggaatgtaaaatggtacgatcattttggaaacaggaaccatcattttctataaaacaaaagatacacctaacctttgattcaaaaatttcccaaccaggtaatttcccaggagaaatgaaaatatatatctataaaaagacttataaaaatgtgcaccatagcttagccaacaatggattcaactcatgtgtctgttaataggaaaatggctaaacaaaccactgcatatctatacattagaatattgctcatcaataaaagggaacaaactattgatacacgcaacatggatgaacctcaaaaacatactgagttgaagaaacctcacacaaaaatacaggctgtaggattccatttatacaaagtactcaagcaggcaaaactaatctctagtggtatagaaaacaaaaacagtgtttgcctgagggggtgagtggtgggtgagaatagatttggatgggacctgagggaactttctctagagatgtaatgttctgtatcttgacagggtttggggttacatagttgtatatcatttgtcaaagctcaataaatgatatacttagaatttatgcatttcatcatatgcaaattttacctctaaacctataaataactgtacataaaaaatcatttagttaacattctgtgtatttgatattaaggaattattgttaatttttattgtctgttttttcagcataataacaaacaaccataacatatcagtggcatcagcaataggcatttatttcttgctcatgtgtttttgagtggcttggagtgccccttcttcaggcttttttttgttggggtggctccaaacttcagatagaaaccaggttttctccatgtatttcctatctttcttggaccagtggttatattggaggcatgtgcctctcatgtaaaagcaggaacatgtacaggtaagcccagtcatataagcacttttcaagttttgctcggatgatgtccactaacaaccctgtgatgaaagcaattcacatatattagtccattttcatactgctatgaagaaataatcaagactgggtaatttattttaaaaaagaggtttaatgggcttacagttcatggcagaaggtgaagaaggagcaaaggcatatcttacatggtggcatacaagagcgtatattttgcaggggaactgccctttataaacccatcaaatcttgggagatgcattcactatcatgagaacagcataggaacccccccccaccccatgattcaattacctcccactgggtccctcccatgacatgtggggattatgggagctacaatccaaaatgagatttgggtggggacacagccaaaccatatcactccaccccagcccctcccaaatctcatatcctcacatttcaaaaccaatcatgctttcccagcagtcccccaaagtcttcattcatttcagcattaactcaaaagtccaccatccaaagtctcatctgagacaaggcaaatcctttctgcctatgagacagtaaaatcaaaagcaaattagttacttcttagacacaatgggggtacagcactgggtaaatacacccattccaaatgggacaaattggccaaaattcaggggctacaggccccatgcaagtccaaaattcagcagggcagtcaaatcttaaaaccccaaaatgatctccttggactctgtctcacatccaggttacactgatgcaagaggtgggttaccatggtcttgggcagctccgaccctgtggctttgcagaatacagccctgcttctggcagcttttatgagctgccattgagtgtctgtggcttttccaggcacacagtacaagctgttggtggatctactattctggtgtctggaggacagtggccttctcttcagagctctactaggcagtgctccagttgggactctagggggattccaaccccacatttcccttctgcactgccctagcagagtttcttcatgagggctccatccctgcagcacacctctgtctggacatccaggtgttcccatacatcctctgaaatctaggcagagattcctaaacttcagttcttgacttctgtgcacccacaggcccaacaccacatgtatgctgccaaggcttggggcttgcaccctctgaagcaacagcctgagctgtatgttggccccttttagccatggctaagacacgggttactaggtcctgagacttcacaaaccagcaaggccctgggcctagcccaagaaatcattatttcctcctaggcctcccaggctgtgatgggagggcctgccgtgaagacctttgacatgctttggagacattttccctattgtcttggcaattaacctttggctcctttttacttctgcaaatttctagagctggcttgaatttctcctcagaaattgggtttttcttttctattgcgttgttaggctgcaaattttctgaacttttatgctctgcttcccttttaaacataagtttcaattccaaaccgtatctttgtgaataaataaaactgaatgcttttaagaacacccaaatcacctcttgaacactttgctgcttagaaatttcttcctccagataccctaaatcatctctctctagttcaaagttccacagatctctagggcaggagcaaaatgctgccagtctctttgctgaagtataacatgaatcacctttgctccagttcccaataagttcatcatctccatctgagactacctcagcctgggttttttggtcaaaaccattcgacaagtctctaggaagctccaaacatttccacatcttcctgtcttcttctgagccctccaaactgttccaacctccgcctgttacccagatgcaagttgcttccacattttggggtatcttagtagcagcaccccactcctagtaccaatttactgtattaatccattttcatactgctatgaagaaatacccgagacaggaaaatttattaatacaaaaacacaggtttaatcaactcacagttccacatggctgataaggcctcacaatcttgatggaaggtgaaggaagagcaaaggcacatctttcatggcagcaggcaagagagcatgtgcaggggaactgccatttataaagccattagatcttatgagacttattcgttatcatgagaacagcatgggaaaaacccactccttgattcagttacctcccgctagctccttcccgtgacgtgcagattatgggagcaacaattcaagatgagatttgggtggggacacagcataaacacatcatatggccaaactcagattcaagaagtagggaaatatttgatgccaaatcaaggtatggatgaataatactaataagagggggtgtgttaagaattaggacctttgatattcaatctaccgaggtgttattatagtattatgttaaagattttaaagtagtctttatttttggaaatacatgccaaaatatttaggggttaaatgatagataggtggaatttgcattaaaataatctgaagaaggagaagtgggtggaggtatagaggaaaatattggctaggagtctataatgattaaaggtagatgtgtgccctagagggttcagtataccattctttgtacttttgtatatgtttgaatttttcataataaaatattaaataataaaccaaaagaaatcatgtgtgaaatctgtcacttttatatgtgaggaaacaggttatgagagggtgtgctacttgttctttgatgagacacctagttcttgccagaatgaagctaggatccaagccaatacttttcattaatgcggtttttggtcatttatttgctaatttctctaatgtttaatactagcatctgtgcaaaatgttatggataagaagataaagctttctattcctgaaaatcccctagtctaatggttcaatgtagatctaaataattataatagaaggataggagtagagtaaagtgctgtaatgagggtatacacaaaattcatgggtacacaggagaaggcatctctaaattttattgagaaaatccaagaaggcttcatacatgaggtaatattttgaccaaaaatcgcaggaccaatgaataagccagagactgcattgtaggcagcagaagcagcccacacaaaggtgatgaggtgtaagacagcatggcattttggcactttaggggaattatatatgactcagtgtagttaaatgttaacttcagtgtatgtatcgaggggttctggggaaaacaggcaggaatgatgaggctggacttacatgctatgcaaaaagttgagacttaattatttagatcaaggttgccttgcctaattataagaatcgcctggggctctcattaaaatataggaccttaaagtcctagctctgatctaatgaatcagaacctctaggggaaagaaaagtttgggaaacatgacttgggaactactgaagaattttaagcagaggagtgatgtgttcagatttgcatgttagaaggaccaccctgacagcagtagagaggttagactggtgaaaggtaggtgtacaaagctagaggtatgaagatgaatcagatgggtgctgcaagagtcaataggagatataatgagttcctaagtcatgacagcagaaataatggttgagaggaaatgatgttacagagctaggattggtaggctccaatgagtaattgcctctagagagtaaaacaggtggattctcctttaaatgtctcacttgatgggtggtaggataatgttcctgttgactttcagacacagagttcaaggattcaggatgaggtggtatagcagactagataatgaactcattttgggtcttgtacagcctgaagtacttatcagacatataaagaaaagtatccagagggcaggtcttgatttcaagaaaaaaatgttagctacaggtagaaatttagtgagcatcaatatgaaagtcttagttaaaacgctaggtttgcattagatttctcagctagatgatgtagtttgagaatgaaagaagtcagtacccaggaaagcagcagcatttaagggagagacagaaaggagatttgtttagaaagagaaggagagggaagtattatgaaaatcaggtgggcaaataatcacaaatgagtatggaaatatgttcactggatttggcaaaaacaaaggttggtgttggccttacccagggcagtgtcagtgaaatattgaaggcagaaactatagttttgggtggagaactgagtaggagttgaagaagaagagaacaaatgtagttaactctttctagaagcttctctgggaataaagtactgttctacccttatttgagtaggaaacatttttggagaggggtgtgcttaattaaatatgttgctccttttccctggcaagacctatgattcttgacaggtgttaaggtttactggtttgcatgtttgaaagaactgataggaattccttttagtccttgtgttgaaaattcattagctagtcattcattgttaatttatggcatggatttaagagtttggagtaaatttgtatgaaagaatccaggtgtgactacagtctgtacgaaagaacacatatatattgtgttacatacttggggtgaccattcttatgttgctaacattcatatatgtttgtacacctcaggaaggatatttcctatatatttgtgtaaatttcaaaactaatgctgtactggagattcatcaggtctttcccaaatttttaaaaccaaaattttgagaggatagattagatagctagctagatagatatagatacatatttcttagagacaaggtctcattctgtcattcaggctggagtacaatggcacatcatagctcactgtaactatgaacttctgagatcaagcaattctcttccttcagcctcccaagtagctaggactacagatatgctccactgtgcctggctaacttaattttttttttttttaagagatggagtctcactatgctgcccaggctggtcttgagcttctagcctcaagggatcctcccaatttagtctcccatagtgctaggattacaggcatgagccaccacacctggcctttgagagaatactgacagtgaatttggagacaagctgtcaggaaaaacacatgttttatcttattttatttttagattcagggcatacatgtgcaggtttgttacgtggatatattgttgatgccgaggtttgggcttcaattgaacctatgcccaaatagtgaacatagtatccaataggtattttttcaacccttgtccccttccctgcctctctgcttttggagtccccagtgtctattctttccatcttcatgtccatgtaaggaaaattatgtatgttaatgttaattttctttcctccgtgattagatttttaaaagagctcttgagggtctatgataaggttttagaatgtatgtttattttaaagttccattttatatgttatctgtttaaatcataactcaagcacttctttttgaagtgcactcgtgtgccacataatgctgtttcggtcaatggcagactgcatatataacagtgatcccataagattataatggagttgaaagtgtcctgttgtctagtgatgtcataacatcatagcacaatgcattactcatgtatttgtggtgatactggtgtaaacagatctactctgctgccagtagtatacaagtctggcaataccattaagcacagtacataatacttgagaatgatgatgaacgtctgtgttactggtttagtatttacttactatactttttaccattattttagagtgtcccccatctacttatttttaagaaatttactgtaaaacagccataggttggtctttcagaagacatttcagaatacgttgttgttataggagatgacagctctgtgcatgttcttgcccctgaagacatttcagtgggacaagatatgggggtggaagacagtaatattgatgatcatgaccctgtgtaggcctaggctaatgtgtgtgtttctgtcttagtttttaacaagaaggtttaaaaagtaaaaaaataaaaatttaaaaatagtaaaaagcctatagaataagaatacaaagaaaagacattttctgtacacggaacaatgtgtttgtgttttaaaactaagttattacaaaacagtcaaaaagttaaaaaggcttataaggtaaaaaaaattatagtaagctaagtttaattttttattaaagaaagaacatttttagtgtaaatttcatgtagcctaagtgtaatgtttataaagtctacagtagtgtagtagatattcacgttcacttaccactcactcactgactcacccagagcagctttcagtcctgcaagctccattcatggtaagggtgccctatacaagtgtgccattttatatttttataccatatttttactctaccttttctgtgtttagatatacaaataccattttattacaattgcctacagtattcagcacagttacatgctgtataggtttatcgcataggagcaatggggtatgccatagagcctaggtgtgtagtaatctataccatctacgtttgcgtaaatacactctatgatgtcacacagcaactaaatcacctaatgatgcatttctcagaatgtatccccgtcgtcaagtgacccatgactgtacttgtttggttacaattgagagaatttattacttttcttcatccccatatatcttagcagacatgaagcaggattgaaaaaaaagaattctcattaaagtctattctgaaggtcgtcaacactgctgccctcctcccccttttccccacattcgtctgtgaatttgagaacatccgcaggctgacaagaatcttgggaaataaatgaaatgcagatgagttggagctgtactatcatcaagacttgttgtctcagtaaagaaatgttttaggtcagagtgtagagaagtggaccctaagaggaatgtgatgatcctttatgggaagatgattgttcctgctgtggtggctactgctgtacctgggatgggttagtggggcatgaaaaagaataagactaccacagaatggggtttggaacggagagttaagaaaatgattaaaagtttatatttgctacaatatgactattaagatgatctgaaaatgcctagaaataaataataaagtataagaaatattttctcaagtgcacagctaagcctatagaaagtaaaacaagatttttgagggtcaaagtcacaaaaaatatgaaactagactagtaactaggccataaatctgcaggtactcaaagggaattagccaatcttggtaaccaagaatctatctttaaagagtcttttggggatagaaagtaaaccttaggctgagcaatgaagagtcaagaccctcctgtataatgccagaatctcactcagtgtaagggtaggctttgaaaattctttctggcaaagggagattaaaaaattgatctgtcctggtcagagatctggatagctgaaaaaagctcaccacaccacttgtaaggtttctgcaaagtcaagcccaaggcattaacataaagaggtcctcagttgcagtgcccctcagacatttggggaaaccaaacaaaaagcctttcttggaagtaagagcccttaacttagtatggtaaagattactacagataaggccccatgaataaaaactcactaacagaaattataaaacacaaatgggtacaagccatcatgaacaagagtcagcagaatctgtaaatttcaataatcgacacccaagatttcagatactagaattattaatttcaaaatgttacatatatatggacaaaatgttgatggaaatagaaactagagctaatgacatgaaaaagaaacaaggtactatcaaaaatgacaggcaaacataatgggcatatttggataaaaaatacaaaagtaaaggaaaatatcacaaaaatgaaaagtctgatggagagtttaagcagtaaattggtcatagctaaagagagaatttgtgaactgcaaattagatctgaataaatcaccgataatgatacacagacagaggcagaatgatggaaaaatgacagaaagaataagagatggagaaaagaatgagaaagtctaatatatattcagtgagaatttagaacaaaagagtacagagtccaggagtggtaatattcaaagggataatggttgaaggtttttagaattaatgaaagatttaaatcgttaaatttagaaggtggaagaactccaagcaggataaatacaactgcagaatacgagagataaagaaatgtttgagacaacttaggaagaaaagacgaattacctacaaaggaataactgactgaaaacagacttttgagtagcaacaatagaaaccagaaaacagtataatagtattttcaaagatccatcaaggaaaatttaattccagcataactattactgacaaacaagttgaaacacagcatttctggacaaagaaaaattgagcatttaataccaacagacatgtactaaaggaacaaaaggaacattgtaggatatacagcaaacttcgggatgaagagaactgaatccacaaggaaggacagagatgcaaaatggagtaatgaacaaatagattgggaaatcatataagtaaatgtgatcaaacattggctggataaaacaactaagaccatcacagtgaccaattgtgaaaaaaacattataatgaaaaatctggattagaatgcaaaagggagtaattaagtgttctgagagcttttgatcatttgggaagagacagtgagcttaactttagtttgtgttatgtgagaatgcatgttgaaattttaaggtaactcctaaaataatagaagtatttgataatacttttaatgtgctagagggaaatatgtaataaacatgccagtgaattcaaaatgaggcacaagatgaagaaaaaaaaagcatgtacaaagaggctaggtagaaactgcaaaataagatgaaaaaattaaatccaaatgtcctaatcacaataaatataacaacacacagattttcacgttgtattttaaaaattaatgaataacgtaggctcaaaatatctaaaacaaaaattggagaattacaaagagattgtcaagttcacaattaaattgagagaatttgaggcctgtatcctactaattggtaggtaaaactaaaaagtaaaaaaaaataaaaacaaaaatatggaaaaatacaactaagaagcttgatctgatagtcatatactgctggcccttgaacaacacaggtgtgaactgtgtgcatttacttacatgtggatttttttcagctaaaggtggattaaaaatgcagtgtccacaggatgtgaaacttgagtaaaccaatggctgactttttgtatatgtgggctctgtagggctgaattctggactggagtaggcatggattctggtatacgtgggggtgtcctggaactaatttcccatgtatattgaggagcaactgcataacaattgaagaataaatgttttttctcaatcacataggagatagttgtgaaaattgattacacaccgggccacaaagcaagtatcaacaaatttcagaaaactggtatcatactaactgtgctctttgataatattaattaaaaatcaacattcaattctttcaaaatctgctagaatagataaattggagaagattgaatgaaaagagagattaacaaatggtagggacaaaacagctaaattactaaaagaaggtttttcaaacaaatggtagtatgcttaaaattttatgttaatattctaaaaatttggacaaaatggataccctcatataaaacagaataatgaataaatatacaaacattaaagtaattgaaccagtagttgaaaatctacaaattccaactatatacacacacaccgacacacacacaaacaagtacaaaaagggtgtccagttttaggagtgagttctacaggactttcatggcagagataattacattctttcacaaatacctactttcaaaaataaaaaatgggaacctccccacttaatagtttagtataaattcaaaaagctagaaactgactctggaaccaatactaaaagtaaaacaactcagaaaatatgtatagcaaggccaagagattcattatgctttgaatgcaactttgagagaaatagagcataaaattcaggaaaagctattatgacgaaaaagaaccagaattttacctccgtatacaaagattttatttcctaaacaacttagagagtgaaaaaagtcattgtcatgggaaataaagaacaactaataataaaatttagctaaaaataaaaccttataaccacatgttaaacttgtttgctgatgcatcgagacagaatggcaaagtagggagaggaaaagtatgtttttaaaataacatagtatgaatgaggtatcttaacgctatatgcaattatctcttctaatctttactaaagctttgaagtaattaatgtcataatttttcagattagcaaaaggaggctcacagttccaagctagccagtagtagaaccgaggttaactcagtcctacgctgtttcagaaacaccatatttcattcttgacaccaagatgacgcttaagaacatatcaaatttttaacttggatcaagctgagtaatatgagcccatttaactaaaagtaacactattttgtgcctaaagcagacccttaaattatacctcttaaaaagaaaacaaaatataaaatgtactatttattaaaaagtataaaaatgaatatgtattagttgaagaataatgataaaatgaacgcttgtgaaactatcacccaagaaataaattgttcttggtacctttgaagatgcctgcacatccctccttcccagcaccttcaacacctcctggaagtaaccagtatacagacttttgtgctagcctctataatttctttatagcttaaccatatgtaaagatatcctaacaagatactatttattcttaggatgatatgcaatgcttcattctgtattggatctcaatccagaaaaaaaagaagcttataaagaaaatttttttgtcacaacaagcaaaatttaaatctggaatatgtattagataatagtattgcatcagcaatgttcagttttctcattttgttaaatgcactgtgattaagtcatagaaagtccttgttttagaaagcactcttgagtatttatagaaaacaaaattaaaataaacacatggagtacaaagcacaaacctaattccctccataagatgaaggctcccaagaaaagatgaactgaacagagttgttccctggcaacccctttctgagagtttacaagactctattctggcaaagttgatgcaattatgaatgtgtccctgccagggtgaaggagggacagtttcatagtcagatagattgggaggggatacagggactcaaggttcttgcacatggctataaagctgtacagtttttgtactgcacaaacctggtagaatggcaacaagatgggggttggagggtgtgccgaagttcagcctagaaattttccccaagaagtaggcaatagaaggggtttattttgcagtgtatttattttgtaatgtatttattttgcaatgtatctgtttgaggaggtattttttaaagaattttcatgaatgctaacttcttgctgagctagttctactaacctcttattagctctcaaacagctttcagaaagttgttattttagccctttctgactgttcacttctagattcagagatcccttctgcttctatatcctgtaccttttgaagattgttgggcggcaggaatgacactggtcctctgctttctccactgtcagctcagggtttggcactcttgtgttggctaagtcaggggccactggaccgcctgattccagttataaaatttggttgctgtgtgtgctctcttgttctccccgtccttgagatgtgtctttaaacaaatccttcagtgaagttttagatgaagcaataggagaggcacatttcagccttccatcttaacatagaaacctctcagatatctagtacagaaacataatcactggtttttactcttcctttaaaatctgtgtgtcctgcaggaaataaggtgcaagaaggtgaagaatggattagtaaagccccagtgatgaagtctttagttggaaaaaaaattctcgatgtctgtctctgcctttccgggtaataaatgcttagttgtatgttcgacagccccgtggctctctagtgcagagctgattaggactggaagtagcccaggtgctccactctcatcaggaattagagtctagaatgatccgggttattctaaacctgttatattgggcagtgtaaccttagtgctatggtttgaatgttttcatctcccccaaattcttattgaaatcttaactcccaaggtgattatattaggaaatagggtctttgggtaggtgatttcctagtcagagccctgttattgccaatttgaaatcatatgcatttgatgcactaaaatgtgaaatccaaaaagacccctaaaatttgttaaagtgaaccttatcccaagaacctataaaataaaaactttgtattaatttctttaacaaataccttattaatattttataaactttatagggccagtccacagtcatgaaattcagtgttagtctaaaagcaattgagttcagtgtcagaggtgaatgatctcagtttaccactgagaattatttatactttaataaaaagtttctcagtctagattaacctagttgattagaaaattatgttaatgaaggaaaaattagagtttaaaaagtgtgtaagttaatttttcttgcattcacaatcttagctgtaacttctggaactggccaactggctggattcttttacagttactaaactgtaccagctgtggtgaggcaaaagtgtgagccagtgcaagaagttcatgccttgctgatgtaaatcaaaggttttattcattcctttctttattcactcattgctttattcagtaaacattctgaacaacttttctgtgttgagtagagttttataccatgatgttatataattctcacaagaatttcattatctccttcctcagggtctgaatgattgagaaaaccccaaatctgtgctgtatggcaaaaagtaaaataagaattcaaagccaggtcttctgactctaacttcaggattcttttccctatataatggtaatcagctaggagatcaccactgaaatagctggattattttataaaatactgtaattcagaaaacgtaaacaaaatttgttttatactgatatatatttttattagatttactgaaataaagatgtttagaaatgttttgttaatacacaaaggaaattgaaattctaaataattgccaacagaatagtattttactttagtctctgcattcgttcattctgtgtttctataaaacaatacctgagattgggtaattcataaagaaaggaggtttatttggctcacagttctgcaagctgtaaagggaacatagtgccagcatctgcttgtggtaaggcatcaagaagctaacaatcatggcagaaagtaaagggggagccggtgtatcacatggtaaacaagggagcaagagaggaagggggagggtccaagacttcctttaacaaccaaatcttgcatgaactcatcactatggggaaggcatcaagccatttatgaggggatctatccccatgatccaaacacctcccactaggccccacctccagcactggggatcacatttcaacatgaggtttgtaggggaaaatgttcaaactatatcatttcacccctggctccctaaatctcatgcctcctcacattgcaaattataatcatcctttcccagtggtcccaaaggtcttaactcatttttagcatcaacgcaatcaaaagtccaaagtccaaaatctcatttgagactcaaggcaagtttcttccatctatgagcctgtaagattaaaaacaagttatttaattccaagacacaatggtggtacaggcattaggtaaacattcccattccaaaaggaagaaatcagcccaaaaaaggaggcaatcgattctacaaaagttcaaaatggcagatcagacaataaatctccaaaataatctttgacttcatgtcccacatccagggcacattggtgcaagggtcgagctcccaagaccttgagcaactccacccttgtggctttgcagagtacagcccccatgactgctctcacaggttggggatgagtgtcacctgcagcttttccaggctcagagggcaagctgccagtggctctaccattctttggtctggagggcagtggcccccttcccacaaatccactaggcaactgcccaatgggaactctgtgtgggggctcaaatcccacatttcccctcagtactgccctacatgagtctctctgctggtgctgtgtccccaaagaaggcttcttcctggaaatcctggctttcccacacaccctctgaaatctaggtagaagctgccaagcctccttcagtcttgcattctgtgtgctcgcaggcttaacaccacatggaaaccactagagcttatggtggcttgagttctccaaaacagcagtctgagccatagctggggccctttgcaccatggctggacctggagtggcagaagggtagtgggagcagcctcccaggtggcagggggaaatggtgccaaggcttggtccctgaaactattccttcctgcctctaggcctatgatgggagactcagccttgaaggcttctgaaatgcctttgagccctttttcccattgccttggctattagcacttggctctcttttagttgtgctcatctctctagcaagtggttgctctgcagtctgtttggaatcttcccctgaaaatgcactttccttttctaccacatggccagcctacaaattttccacagtttaatcctctgctttccttttaaatataagttctaactttaagtcatttatttgctcctgtagctgataataggttgttggaaacagcctcaacgcctcttgaatgttttactgcttagaaatttctcctaccagataccctagatcatcattcttaagttcagccttccacaaagttgtagggtgtggacaaaatgtagccaagttctttgctagggcataacacgggtgacctttgctccagctcccaataacttcctcaattccatccgagatctcattggcctggacttcactgtccgcatttctatcagtgttttggtcacaacacttaacaattttctaagaaggtctaagctctcccttgtcttcctgtcttcttttgagacctccagctcttccaatgtctgctcattacccagttacaaagctgcttccacattttaggcatctttatagcaactctccactcctggtatcaattttctgtgttggtccattttgcattgctttaaaggaatgcctgagattgggtaatttataaataaaagaggtttattaggctcccagttctgcaggctgttcaagaagcatagtaccaccatctgcatccggtgaggcctcaggaagcttacaatcgtgctgaagggtgaagggggaactggcacacacatgacaagaaaaggagcaagagagtgagaggagaggtgccagattctttttaacaaccagaactcatgtgaattcattactacagggaggctacctggtcattcatgagggacttaaccccaggactgaaaattctctaactaggccccacctccaacaatgaaatcacatttcaacatgagatttggaggggacagacatctatactatatcagtctctaaacttccaccaaaatatattcttcaacttagtgggagagattgtaactgtatcatttttacatgttggaacattattttcctcattttttcccccaaaatagtttcattgtctattttattaagaattatactaatgataatcagtttttgttattaaaatgatttttagaagaacctatatttagctaaccaaatatcttatcaatttcccttcatgtgacattaagctactttcaaaatttattaaaatctattttaatgaaatgtattaagataatgtcataggaaattttacaagaatgaggcacgtatcaacttttaccaggcacggtaagcaaaattatgaattttgtctttatttcagttgtcatctttatctaatttaacaatgcaggtctaaatttcctcaagatttttttcctcatagaaatactaaaaagatagatgatcaatagatgggttatgttttaactagacaacttgattctaaagtccctgaatattatttttcctgaaataatgctgaaaatgaaaatgagagggttctacacctatcagatattaaaacttatatatctataataattaaaacagcatagtcctggaatacaactataaatcaattagggaacacaaaatctataaacccaaaatacataaaataatttagtatgtattcaacgtggcatttaaaattctagagtaactgataaatggtcctgagacaactaggtagccagttcacataaaaggaaatttatatggtttgtaaacatatgaaaagctgatcaacgtcatttacagtaagagaatttcacctataaacttcatgaagatgaaaacattgacaagagtgttgggaatcaacacactcattcactgctcgtgggaatgtaaactagttcaatttctataggcaattaatccaaattgattaaaatttaggatgaacactccctttgacacaacaattatacttctgggattctattaaaatttatctttggaaggtacacaggaacctgctaatagtgtagttgctgtttcctgtgaggaaaaatgggtgtctgggggcaagatagtgagtgtgttagtctgttttcatgcttctgataaacacatacctgagactgggtaatttatacaggaaaaggcatttaaaggacttatagttccgtgtggctggggaggcctcacgatcatggcagaaggcaaggaggagcaagttacatcttacatggatggcagcaggcaaaaataaagagagcttgtgtagggaaactcctgtttttaaaaccattagatcttggcatggtggctcacacctataatcccagcactttcggaggccaaggtgggcagatcacctgaggttgggagttcgagaccagtctgactaacatggagaaaccccatctctattaaaaatacaaaaattagctgggtgtggtggtgggcacctgtaatcccagctacttggaaggctgaagcaggagaattgcttgaaccgaggaggcagaggttgtggtgagcccaggtcacgccattgcactccagcctgggtgacaaaagcaaaattctgtctcaaaaacaaaaaacaaaccaccattagatctcctgggaattattcactatcatgagaacagcacaggaaagacccacccccatgattcagttatcttccacttcgtccctccacaacacatgggaattatgggagctacaagatgagatttgggtggggacacagagccaaactatacgagtgagtgagtttgattaatttttttattctttgtactttcatgtcttcttaattttatccatatacacatgcatgcaatccaatttaaaaataaaaatatggaaagcaaaacatttgttttttctatttaagttttagtgaaacacaaatttaccatgcacagtttcagttttac

SEQ ID NO: 3145 - DNA, 1029 bp, Homo sapiens
agccatcccagtaactgaccattcacttacagttgatttaaaaaacccctctgcatcctggctagttgctcctggtttctttttgccagaagtcaaaagaggaagcagaaacacagttatagaagtgcaattgttagtgttacctagatatttctttccttcttttcaggcattaaagtagcaaaatgggcatctattggccctgacttcagaagatgaacaaagaagggcagaaagagaaccacaatcctacacacaggagattttgaagtttcacaagacagaatctacatataagaatgggtatgtattcacagttaaaacttcttagtcttaaacaaaaacaaacagcaaaattcattgagtataattttgtcaggggtgagtattagagtaggcttagtttgagtttatgttaacttcttttccaatatctcatctacctcctctagaaacaaggatagaaaataatgagcctcaagtctgtaataaaatgttgacaattcatcttccatagtcattcatataggtttagtcattctcttttagagaataagagcagtagtaatattgagatgcagctggaaattccatctattctccttttaagtctaaaagtgggaataaaacaaggaagcattagttgattatgactgtaaataaaatattttctgattaaaaatatctatcttctttttttggagatttccatcaaaggcagagtaaattgtcccaagacagcaattcctggattcattaatatatatataaccttattctgctttggagtggaaatgaagatttctgatcttagcgtctcataaaatgttggggttttacacctgcactactatgtatgagggcaggggacttagagtatgcctctggacctgatttcagccctatgagagggatttaaaaaaatacaataaaatgaaacagctcacaacacttaattaattttaaaacattacagtatctatagttaatatttgttattggttgaatggtatccccgcaaaatacaca

SEQ ID NO: 3146 - DNA, 4158 bp, Homo sapiens
gagatgctgaaagtgcaaatttgtatatggaatcatctacttcttaaaatggtgtgtgggctaacggaaatgtactggcaggcttcattcacatggggaccagtttacaactgaagacttggccttgaaaaccagtgcctttttagcctcctaattggtctccctgcagccatccttgttctctcctctgttctccacccagcagctagagtggtcttttaaaaatgcaggcctagtggcatctcttctctgtctaaaaccctccagaagtgtgctgttagaattagggtaaaggccagaggctttcttatcctttaggaaagtcttcagggctccctgcacccaccaccactctctcagttctgtctactctttttgcaactccttttggctcctctaaatcaccacaccagcaactaaagcctttgccggtgcttactagtccacccacttgggatgcttctcaaccctcctacccacattatttagcaaagttttaaatgccttccaaggctcagcttatgttttaacagaccttcattaaccccctacactagtctgcttccatcccctttgtatttggtcgatgtgccctaattctttcatgttgtactgcgatcagaccttgaattccaatcatctgcttaacaattgtctttcctactggactatgatgttccttaatggttggaatgatgttgggtttgtttgatggtgtagcttttgtacctggtacagtgtcatgcatgtagtatagagctttataaatatgcattgatttgacattgaattaacactttctgtgataagcgtggaatgttggaaggacacaggatttcataaggggataagctgtggcttccccgcagtgatctttagactgtgttttctctaagactcttaaaatccattcttgtgaaagaggaggcagttctacgcggtgacttgctttctcttataatgaacttgttttgctttctgaaagatagcttattaattgatcactatttttcctcaaagctgctcagtggtctttatatttattctgtgacataaaaaagaactggaaggactttcagaatgtcaaatacatagtcatgtggcctgaaagttaaaaacatctgtacttcaagggctcttaagatgactggaagaggaaaatatgacttcagtagataaacataaaaaaggtaaaaaattaaaacatttcattactctgaatttagattaagaatagagaggagcttatatcattcagtaacacattaatataaatctagatacatcagggggagccaatggagatagatggtaaaaagaagtggggtcagagagagaagctgagaaacagacacaagaaattcctgctttctcctctttcctatctccattctttacatgaagacctagaaaggaagagacaaactttcctgtatctatggcagtcacctgcaaggatgtcactactaaaagcaatagtcaggcctttctttttggatgtgtggcacaactgtgggtagatattatctcttagttcttatttaataacctgtgtaaaatgtaatggagcccacctctgcccaaaacaattgcagattgtgtacattgaggtaagattccttattttctttagaaatgtgtagtgctcttatttactgcacttttattccttatattaaatttatatttatagtgcagaatttacaaaccagatgaaagtatctccaaatgccataatgcattggctcatttctattaattacttcctggaagaaaaatcattcttcttagagtaaaaggacatcaacttctctgagcaccaagatactgcctaggttcccttccaggatattgactcaggagacttcattgtgaagaaatgtttactaacaaaactggaagccaatgtagaatacactaatttttgcaggaaggagtttccagtctctttttcaaggatttttttaagatacagctggaccaaaggttctggtagcactctttgaatacacctttctattctatgaactgaatgttgcaaacctgtcacagagtcatagataagtagccttgcaaaggaactttcaaaatcaagtgagtaaaaaatgttgtttttttttttttcctgggaaaaataggactttggttctcttgatggactgtgtatggaaatccaggctgtgatgaggtttttaacgtgggccttggttttaaataatgctttaaaaactgcatttgcattttcttttattatctccatgaagggaagtagttagaaatcggatcttcaagaaaataagtaaacatcactggcattctttaacaatgtgaactctcctgaaatcctgctctttaagggatcaaattttttatttccttatgtttcatgggaactttacattgaatagacttgagagcagcctagtggactaccttggccttattttggctgatagtctcattagaaatataccaaagggtaagaagaatttaattatgcctccattagtatcccctccttgggtgattttgtagccattcatttagaaatagtgtttgtcagatctgggggaagactctagggtgatggtccttgatgtcagctacacgtggaaatcaatagagagttgcatatctgggtttccaggccacacccaaaaccagtgaaatgaattcatggttacatcgtatgcatcagtattttcaaagctccaaagggtgagtccaatatacagccaaatttgagaatgactgctttcaagattaaccaccccagttgttttaaacaattggtaagcattggaacactttttgcacacgacatgttacctggaatctttataaaagatgtactgttgcctaaagcagggcagggtctgaagtcaacccactttgcctgccccttgttccctgcccctaagggagattctgtgaaactcagggctccttgaagcactgattaaccactgctctaatttggaatcctcacttcatgggtccgagactcaaagctgtccagtaacttgctcaaagatgctttctttttttcctcccttgttctctgtcttccacctccactttctttcctcccaaggaggaatgcagttaagcagaagaaacataattttagcctgatgtgttagatttgaacagtggcctttcctcttccactctctcttagatcttcaagccctagaaagcagtgaggaagaaagcttagaactccctaagcactaagtgttgtctgtggactgaatacataatatctgagaaatatatttgctattattttttcatatacagatgccactgtgactgataaaaaacaaattcatttcaaaaataaatacattcaaaattataatatacccttaccagctttttgtcatgatgcattttatcaatcagtaatagcaatggtaatagcccttactgaacatttactatgtgctaggtactgcacttagtgctttatttgtgacttttctttgagtatcataagaaccatgggagacaaaaattattatctccatgtgagaaacagtggctgacaggtaaagtagttggactgtttgtctataactaaggctggctggctcttaaactgtgcttgactactcaaccttgtgcctctcaatagataactgatagaagtatttttttcacccagtcatttttttctactttaaaggaactttcatttcaagagggctgaaaatcactgccctgcaacatgctgctccttttcctgttccctgactttttactggactctgcacatagctcagttcttcttttcataaagtgatgacaaactcaatgtctgcagggatgaggcagggaatgttaatgagtaaaataggtcaggtttgcattttaagcatgcaggaaaggtttgcaacatcatagaacaatgagaacatgcgacaataataatcacaggataatctatttttctgaaacctgctgctctctgggaccaggcttttcttctctttattcccacttttgttagaaatgtagccaccaaagtatttctctatgaaaaattatctatctatctatctatccgtccatctgtctatctgaaacaagtttaaatggtcatagatattagactttttgccagagatacaataaggagtggtggggtctagg

SEQ ID NO: 3147 - DNA, 4540 bp, Homo sapiens
tgaaggttagcagcccgggtagggttcaccgaaagttcactcgcatatattaggcaattcaatctttcattctgtgtgacagaagtagtaggaagtgagctgttcagaggcaggagggtctattctttgccaaaggggggaccagaattcccccatgcgagctgtttgaggactgggatgccgagaacgcgagcgatccgagcagggtttgtctgggcaccgtcggggtaggatccggaacgcattcggaaggctttttgcaagcatttacttggaaggagaacttgggatctttctgggaaccccccgccccggctggattggccgagcaagcctggaaaatggtaaatgatcatttggatcaattacaggcttttagctggcttgtctgtcataattcatgattcggggctgggaaaaagaccaacagcctacgtgccaaaaaaggggcagagtttgatggagttgggtggacttttctatgccatttgcctccacacctagaggataagcacttttgcagacattcagtgcaagggagatcatgtttgactgtatggatgttctgtcagtgagtcctgggcaaatcctggatttctacactgcgagtccgtcttcctgcatgctccaggagaaagctctcaaagcatgcttcagtggattgacccaaaccgaatggcagcatcggcacactgctcaatgaaccaagaaaacccacacagtgaggattaaatcggtttcaaagttattttgaggctgttcatatggtgcatacctgtaagaaacaaaacagaaaaatttctttgcagcaaaattctgacaattgaaacacagagcaccagctctgaggaactcgtcccaagccccccatctccacttcctccccctcgagtgtacaaaccctgcttcgtctgccaggacaaatcatcagggtaccactatggggtcagcgcctgtgagggatgtaagggctttttccgcagaagtattcagaagaatatgatttacacttgtcaccgagataagaactgtgttattaataaagtcaccaggaatcgatgccaatactgtcgactccagaagtgctttgaagtgggaatgtccaaagaatgtaagtggagtctcaaaaaactttttccctgttttccttatctctgtgatttgctcaccttccacagtcatgtggaattcacacacgacactaacgaaatcttgccaagggtaggtgtgaatagagatgacatgaaaatggggattgatatggagattttgagatgaaacttgagtgacagttggtggaaaggcaggagttaggcgtcgtggatgtcagatttgtattccaaagcagtggctaactcactgtggatcccagagccattagcagtaactcaagcatattacacagtcacacggtgactccatttcccctatcttgacaatgggtataaggatcttcgcctgtatcggtgaggataagataaaatgataggcatgaatgttaacagtagtcataatttgcccttttttaggagggaaggattgtataacttgtggaagaaacatttcaaaatctgggacactggcatttttccaaacttgatttcgtttttcttctccaagccatcttttccaaacaataatgcactttattagtgcaaaagatattttaaaaatacattaaaaattggctactggtccataaatatctgatgatggggatttgaaatataccggctttagtataaaaagagtatgtgtacactgcaacaaatttcgctctttctctatttgatgtgtacaaatgtagggaataagaaagtattaggtggatggcttggctcaagcaggcatagggaggtcatggggctatgtgcccagtgatgctcttgtggggctgctgctctttctgtcactccatcatggggggattttggtgatggcgtgctgtgcacatgtgagcagtgggctgggtgctgcgtggggaccctagagatacctgagacatggctgctgccctccaggagcataggataaagagccaggcaccccaatcatgatcctctaatggagttggaggaattacattatgaatcaagggctcttagatgttggaactgggaaacgtgacccttgggtgaaaactgattgaagaggtaaagcccctgtagccaaccagaggcattactctgagggtgctcagctgggaatcttgccctctgctgggagctattgctcagggattgtagcagatgtttgttggtagcccacccagatatctttcctaactgtactcctgccccttcacctttcctaactgtactcagattttagttttcttttataccccttaggtttcaatgtttcagagaaagcttcacagctgggatccactcagtcaattaaagccaatcagtgtattttatgttccagccgcatgcgtgaacatgtaacctaggctggttcaatgagagggaattcaagactcgtgcgtagaatatcaggacaggagtacccttccctccatccatgtgaacaaggaaacaggtagccacaagtacccctggtggccatcctccaatccccagggaagtcagctgtaggacaaagcatgcactgtagatggaaaagtggaaagacagaaatcaagcccttaatagcaccattgaattactgaaccagccaaccctatgaaaccactgcctccaggtcgttttgttatatctgccaagaagaacccattacagcttttggaatgagtgtcttgttaatatttagagtcctcatgaatgagaatggactgggtcatcagacaggaaagcatcctgcatgtgccattccttctgggaagctctttttcctctggacaattccatctgcagatcatgggtcacttttcatccagttcctttccctctctccaaattttagagccattgagttactcaaaatccatacatttgaagataggaagctaacattcaattggctcaggctctaaatccttccactgaagagaaaagcaggataacctgaaatagccagattattcctatgtgtgagattcacgggatgatcaccttctgctctagttttggtctgatgttctgtagacatggatggcacacagcatttctgtgggagaatttcagttcaggctgaaattataaatgagtaagccagatgtggactcagggaaaatcagtacttttgcattattttgtgtgggctggagacccatttcctgcttacattacttaaaacccatatcctgctgctctgtaaaaactggcagcttggttggcaattaaaaaaaataatgtttacacccacaggaaaactccagcatcagccctcaaggagcttatcaccttaattagatttaaaaatatagaaatgggaagaaaatgggatcattatgtccaagtacacaaaaataaatgtatttttgttagaaggaaattgaagggaaagaaataaacacttggaatgtagagattgagagtctaattggatatttttaaagttgaaacagaaggaagcaggcaaatatgagaatcagtaaccaattataccacagtatacgcaactgaaatgaaaccaagaataatagatactcatagaatgttagaagtgaaaagggatcttagagattgattttcactcacctctctcatttgacgtacaagtacactaggactcagaaagatgacacggttctcccagcagtcccaactggctgaagacataaccaagactacagtgaaatcggccacctctcctccccatgccttctctgaagtagcgagattagcaagattcacattccattctagccataggacatgtcagttcatctgtatgtgtcagaatcctttagatgagagtgacagaaaacccagctcaaactggcttaagctacacaactctacgcatgtcactgaacagtccagagtaatatgctggatccaaaggcacatgtttgtttttggggcattgtttctctttgtctctcacagctgatttttgctgtgctggcttcattcccaggaagattttccccatgtctaacaaagaagggcaccaacagctccagactgttaatctattgacccagcaaaaagagagactattagatcccgattgttccatcaaagcctagggacagattctcattggcctaacttgggtcatgtgcccttctgtgaacgcattgctttgagcagggcattgctttgggcaggggatagaatattgtgattagccaggtctggatcatgtgtcaatatctacagcccaggattgaggttgacttcacccaaaccatgtgggtggggagtgtggaagaaaatgttcctcagaggggaatcagaaagacaggaggcaaaaatgacctcatgtccaccatgatttgtcaggtcccacagtgctgttcccaaggcactcttctttatgctgtgggagaaaaaaagaaggataaaactgagaaaatttaagaatcattatagtaatagctaactggacagggtattttctatgtgcc

SEQ ID NO: 3148 - DNA, 2909 bp, Homo sapiens
cttgaaatatcctttttttcttcagtcttgcatttccatgttgtgcaaaacaccatgctgaatgagataacttgatggtaatgttttttttactgaacgaaagtggccctatggtgatttaaagcagggaaattagtacaaatgagattttccccactttgcttagtatcgcttcagggccttaaaatccaaccttatgctttcaggttaaatcatagaataactctatcgagatacaagcagttcgtgaaagagacagcaccaatcattgatctcttacctttaatttgcttttcttattagacacagtaattttagcagaatgctaataggacaaaactgaaaattacagatgacgggagaccacttactatgaaaagcagctactataaaagctagtcctcagtttggtccagtgtccaagtcccacctccagagccaagtccctcctacctcatcatgaaaactctcagcagccctgtggaaagaatggaggcctcctgtccacaacaagcaccaacttcccatgcgtgtgaaggagccacctagaaagtcatcatctggctccagtcaagccttcaggtgacatctgaatgacatcttgaatacaaactcatgagagaccctgagccaggaaaacacagctaacctgttcctgaatttctgatttacggaaatgttgtgagatgatgtttattgttttaaactgctacattttggagttatttgttctgcaacaacagaaaatgaatgcagctcaaattaaacttagctacttggtggccactttcattttaatatcagtgtagttatctatccagaaggcacacccagggacagcgactgtatacttccaaagcagcccgaagtatgtagctttagcaatattccttcatcattcttatggtggcttactctttgacaatcaggtgactgaaatcgttctcatgaacaattacttaagaatgctttcctttcttgaatctagggtgaatggttgaggccagagaactgtagtcttcaagctctatccttttagagggctgtcgaatctcctcagagtagagactttgtgtctttaatttcagatatcctcccttgagaaagtagatgctacttcatctgtcatatgtcatcagggcatttgagactattagatctatcctgtcagctcactacaaaggaaatgtaatctattataaccctctagtttcttattgggttttaatgacttaaaaatattatattttatttacttataagattacaggaagaaagaaataaaggtaaatggaagcacacagtgatttctttcaaaaatactgagaaaaaaaatgaaatgctccactgggtgcttcaggaattaactttacaacctaagggactcataagataagaaaatacatttttgaaggttatatttaaaagctaattactatagaaacaaaattgcattttgttgggaacttccatagatttacagtgttcctgctcaaaaaacacaaaacaaaacaaaacaaaacaaaaaatgaaaaacagcaaaaaaaaattggaaacattaaacttcaagaaaccttaaaggtcagtttctctaaccacatgtcggaagctttaattctcaatatgctttacttctcagaacaacataagatgtgttaaaaaagaaatgtacctatactcggtaggtttcattacataggataactatttatcattataagctaaatgtgaaattttccttgacaattttttaatgttttgaaccaatgaaaaaacgtttttcataaattaaaaataaagttgtaagaatatgaaaaataccagttttttaacagctatgaattttctttaagtaaaaaaataagcaatatgtgtaacatttttattataaaggagactgtaatgttatagtttacagattatgttttaataaatatgttaaatatgcatgctaaatatgcatgacttaattttcatcaaggaatctttgttaaactatgctgtgaattgatttcatagctaaagtctgaaaaccaactagtatccacttcaagaaaggacaaataacaaatgcttgaacaaggatcttacaaatacagtaatatttgagactaacaacttattttacatagttgctaaatgatgattaaaaccaacactatttggaccggacgtggtggctcaagcttgtaatcctagcactttgggaggccaaggcaggcggatcacaaggtcaggagatcgagaccatcctggccaacacggtaaaaccctgtctcttctaaaaatacaaaaaaattagccgggcatggtggcaggtgcctgtagtcctagctacttgggaggctgaggcaggagaatgctgtgaacccgggaggcggagcttgcagtaagccgagatcacgccaccgcactccagcctgggtgacagagcgagactccgtcaaaaaaaacaaacaaacaaacaaacaaaaaaaacactatttgaaagtgaaaactgcctaatttccacaactgttacaaagcataaacaaagattattcaaccctgtttattgctatattaacaaattataccatctttcattataagtataaagagatgccttaaccatatatttttaaaatttgccttcctcacctttggtattattctgttattaagacgttttcagtctgaaatacatggtataacaaatggaggatagttatatagatagatcttccagggacaaaaaaatggcccattcttatcttgacaatgtttaccaatagtgatttattcaataggtttcaatccagtgcatttcagaaaatgtaagtcatcagctggtttctgctgtcaaatcctgttattattgcagacaagtacacaaagaatcgtgaaaccaaagtttccgggtgagtgtg

SEQ ID NO: 3149 - DNA, 20216 bp, Homo sapiens
aaggaagttcaggggcgtctcagccccatccaaaccagaagagatttgtcactgatgctaatgcatgctgctctgcaggggaccactctccctcgaagctccccatagctgctctcagttttatggatctgctctactcaaagccttgcagaaggggcaggggatgcccaggttaacccccgcacgtacaaaggtggagcagttttcatgcatagctgggacgaagaacactggaaagagaaagaaaaattttccgagctactgctaagccagaaaagctcagctctcaaacggactatctcctgagacgtcacacagctgggaactgatccgcaatacagcaaaggtacaactaagaagatgttagcccacatatagtccagccgtgcaatgtattcaagtgatcagtccaggatcatgaatcctgagtgatgacatcagcccaccattttgaaatctcttccagccccaagctaagttaagttattaaagctctttatgactcattttccctaatctctggctaatgtaaaagacaaactgtttccacctttcttgtgcaactgtattcactcattaaaactctcctccagaagaataatattttacttctaagagaaataatattgtgaaagaaaatgctattggcttccagttacataggtcagatttccaagtcctgtggcagacaatgatgtgcaatctttctggtaacacatgggtcagcctccctctcttattctcatctttccagcagtgagtgttttcccaataaacacaagcaactgcactgtgttagggctatcttgtttttctcagaagtatttttcatttacacttttaaaccttttcaatctcatgaacttcctcctttgttatatttactgtatcctgttgtaataagaggatttggcgttttttataccaatttggaaaaacttccttcctggcatccagattttctcttcagatgtcaaaattggagataatggtccattgctagccctggggtgagagagtgagggagggaacaaggggagctgtggtctcgccacgccaatcaggttgacacacttcatgtgtgctgagtggcccagtgtgtggcaacagaggtttactgttcactcctgcgacaccgggacattaaaatgcaaggctagtggtttgaaaattgtcagtatttctaatccacgcactttgaaaagtcaataggttttctaaagaacttaatcactcagaacaaagttggatttattgcaaatgccaaatttcttaatcaaaatccacttttcctggcatatgacatacgtacatctttccaaagcagattccattcaacagtttccttcttaggaaacactaaatatatgataaatcatgtttttaaaaatatctagggaaataagagaagcatataacttagtgtaacttgcctataaaaaatgtcaagaaaattgcttattaaccttcaaagtcctttttaaataaaaccttaatttccaaaggggcctctgcaccaatgtatatgagaattgtttgtgcttaaaaaaacctattggcaggtggtggggtgggtagtgggggagacctacaggattgcctattacaacttcttcacttattaatgaggcaacaaatccggtgggggtgaaatgaaaggtccaaagcaatttaccactggctggcaccagacttagaatccaactctcaaatcggtgcccatttcatgtccctgcctctatcatttgaggtggggtctgagaagccaaaacataatgagaaaccataatataaacgtttcaaaagtagaaactagattttgacccatagccacttcccagtctcttcataccttaaatttctgtctgattgtctgattctgtctaactctagcaaaccagacaactgactggagttatatgagtgcgacagagtggactgtaaatccttaggtacaattcactgcagaggcagtgtccacactgggtatttggcacatctcattcatccatccattgtttcattaaatgaacattgaccgagcacccattatatgcaaggcagcaagtaggttttgaatcctgcaaattacagagaaaaataaaacagtctccctgtcctggagatgctcactttctagtactgaagatgcacaggcaactagaaccccacagtgagcgtgatgccgaaaagggacatccaacttctctggggtcccagagggcatcccaggcagagggcactgcacagggaatataatttgacttagagaactgcaattccttcactgcagctaggggaggtcttctgaaacttgaatatgcatacaagtcacctggggatcttggtgaaatgtggatgccataggtcaggagtgacctctgaaattctgctgcactaacaagctcccaggtgatgtcaccgtgccctgtgcaccacactctgagtaatgctccctgggaggtgaaggtgggaacctcagcaaaagccagttaataaaatgtttgaaagccatgctatcatattgggattctctttgaaactaacaggagtaacaactataattgaatttctttaaaccgatattggctttctaagtttattggaagctcaaaagtcatttttgcagggaagctttctcatccttccctgagtggcgaacacatgcataccttgatttagagcgtgctgcactgtgagctaacactgattcacccactcatcaaatgcactggactctaagcactgggaggaaagaaatgtcttttttttccttcatacatttaatataatttttcttttcttattatttttatttttatatattcatggggtacaagtgcaattctgctacactgatgtattgcattatggtgaaatccgggacttcagtgcatccatcagtggagcaatgcacgttgtacccatcaagcaactgcttctggtccacagtcttcagtcatgtcttttagttttgaatcctcaacccgaatgcacccaacacctaacactgtgtctgacccatagttttttccataaactttggtcacattatatgtttgctctagattagtggttctcaaatgttagcctgcattagaatcccctgcagggcttgctaaaacacagattggtggatcccactcccagcatttgtaattcactacatctgggtcagggcttgagagtttgcatttataatatgttcacaggttataatgcaaaattatataatgcaaaattgtaacctgtgaacatatcagaaatgcaaactctgcaggtgtggtgaccacattttgagagtagatagatagataggtagatagataaatagacagatgacagatagataaaacacccagtaactgcaaattaatattaattatttgtagtaaaggaactcacctcacttgctgctggcacagacaggataaaacagttgtttaacaaaagccacaatgtgtttcgttacaaacagaccaggcaaatgtgagtttaacccttaatcttttaaatctataagaatattaaaactgctgttgcatttttgtaatcacagtttttatttgttcttaattagtaagaacaccagctgacttgccacacccactgggatggttataattaaaaagagacataataacaagcactggcaaggatgtggagaaaacagaaacttcatgcattgctgctgggtgtgtaaaacggtgcaaccactttggaaaaacagtttgacagttcatcgaaaaattaaacatagaattaccatgtaacccagcacattcactcctaagtttatgtccagtagaattgaaaacattggttcttgtgaaaactttcacatgaatatcagaagcattgttcatagtagccaaaaattggagagaacccaaaggctcatcaagtgatgaacagctaaacaacatgtgctgtatacccttacaatggactgtcactcaaccataaaaaggaaggcagtacttttttctctaacatggataagcatgacccaacacgcatgaaacttgaaaatatgatgctaagaaagaagtctgacacaaaggccacatattgcatgattccatttatatgaaatgtccaaaataggcaaattcacaaaacagaaatcaggttagtgattgccagggctgggaaaagaagggaatgagggaatggggtatgactgataaaggtatgggatttctttgggggataatgaaagtgttctgaaatgaaatagtgtttgtatatattttagtatagtcttgtgaataaactaaaaaccactaaagtgtacgttttaaagcatgaattttacagtacataaattatatctcaatgtaaaaaaaattaaggccatctaatgttatttggtggtgctaacattttcattttagagttacactatctgataaggtagccactagccacatgtggctcttgagctcttgaaatgtgactaaagtgaggtcgagtgcagtggctcacacctgtaatcccagcactttgggagctgaggcaggaggatcacttgagcccaggagttagagaccaccctgcgtaacatagcaagaccctgtatctacaaaaataaaaaatatgtatacatataaaaaaaacaaaaggagctgtgctgtgcaggtaaaacacaccctggaaatcagaccaaattttttttaaaagggacataaatatgtgaatacatgtttaatattgaaatgacagtattttagatatatttagttagctaaaatacagtattaaaatgaactgatttgttgatttttgcttttcaaatgtggctactggaaaatttaaacctctgtatgtggcttgcattgtcatcctattggccagcactgccttcaaggccctccccaacagggtgagtgtctttgtaaagaacatgaaaagtgtgcacatccgagggttagtgagatgggtgttttcctttacatacagggctctgtacccagggcttgattagctctgttctattagcaagactcagcacaagtaaacaggccaattcaatggatatttccagtttttgttctttgagtagaaagccacctgcaaaaacagagctttgttatctcaaagagcaaggttctgggccattattattttagaaagtactttttgtgtctctgcctaatggactacacagcaagtcatctgaaaaaggaatttttaaggcataatttttgtcctctttagaatactcttttcccaaggctcaagtcctgcatcataacattcttaaccttgacatgtatttctagatatcagtgaaagctgatcataaaactctgctgaaaggaaaaattcctttaaaataaaccaaagataaggatttatttggtaggcaaagtagttaagggcaatttgtttaaatggtgtaagactgtctatcagtaagaagctaagttgttcacttttaaaaatcacagtatcttttgattataaaaactatagatgttattttgaaaaatttcaaaaacaccaataagaaaaataaataatcaaacacctaaccacactactagagaaaataattgttaatatatagatatctatctttccagggaaaaaagaggtcttgataagtcaaaaattttctatatggagaaaactggctcaatttctgtcattgactattggttaacaaataatagagcatttacttatcatccaatcagaaataattctattggttctctaaatcttgagaagacaaacccagttgttacaggtttagtcaataacatctctgtattacaatttagtggctggactgaatgtaatccttttgccttaacttcaacaaaacaagagagacatttacagtgcacacatagatgatgtgggtgggcatgtttctacacatttttctttcctcttcaccaacaaggttgtataaaaatatttactgctttcctatagattcatgtatgtggtgtagtatccatgtcatgaagcagaaggatggattattcactggagtttttatggctgcacattcaagtgtttccccagctgtgtttacagctttgggtttctaagcctcttgagaagtaatcagttttgatcatcttaaatcccaaagtaaattttcttttctggatattatcctagttgctaacacaggttagtctggcctattgaaccatcttttactgctgtgaccttcaaaaatgaaagctgtggttttgccctgagaagaagaaaaggagatttgaaatatgactcagattcttccctgcaaaaggctgggacccttgaaaactatctacgtggaaaagtgagagaacaaggggacacaagcaaagctgcccaggcacctgttcaccgaagttgaggctggtcacaactccggcggcccaaggagctgctcggttcacccacaaggaatgagagctgcctgcctgctgctgcttggagagccccagacagtcgcttgaagaggtgagttgaaaccctccatttttctctcttggcatttagaccactggcccctgagggatctgaacacggaatttgaatgaaaaaatacaagctgaacggcttgtcgctagtgtttgccccagagggagaagcttttttgagacagaagagtagagagatgactttgacattctagttgcacaataaacttctcccaggccagatatttaatcctttttgtttctctgatcattaatccagcctgtgcttgtcctcgtacttgatctgattaaaacaacaacaacaacctaaagagaagtagagtgaaggcttttgttttgaaacttagcgcgaaggtgcagatctgttcagcccgtttaacgggggctaggaggccagtgcagactggattcagagttcttatttttccttttcttcctccctgtattttgatctaaacctgtgaagtgtccctagtttttttttctttccccctgaaaacctgttcctcagggcaaattctgttgccctattcagaagctgtgcgttccagttttcctctcttctctgaaaaagtctaccattttctttgctctttgttgaacactcttttaaatacgactttgcagtgtgcatttagaatttgtttacatttagacctggactggctgcctgctgacctttggttacagtaagaattaattccctcattgctgcaagaatgtgacttcaggtctgatttttaattttttggacctctttggctttttctgtctctttttcttttaatagcaaatataccgaggaagttgttctgccaggacctggcttttaaagtaattttacctctaggatccatttttgttttcttaatcctgatcacacagcctgtatcttgacagcccaatagtcaaactctttagccaatattgttgtcagagaaaggaaaccatttttaagcccagctgcctgctgggatgagctggaaaaactggaaaaagaaataaatctgcgagacacttcattctagattccaacatcagctgtttttctgagatttaagttagcagatgtttgcaagggaataatctgttaggaattatgctcctgttcatccacccagaaatacaaaatgcatgtaaattctcccaaggtatgaattgaaacaagctgagatcatttttgccttagacagacagtcgttcctcaccactaagaatctgcccagttcttgttgctaatttctgtcttactgtttggaggtccctattgttcttccttaactgacctttgtttattattttccccaagcttgtgagtttaagggggggggtttggccaccacttgtctcttactaaggttctcacttgattcaaagcttggatcttctgataaaagtgcatctaaacctctcctcaagattacattgcctctggtttaccatggttgattagtgcttttcacagtagttaatttatgattaaataaataatttcatcactgtatgtcagcatgtctgagtactaaaggaacaaagctgtagacactgtacccccaggtagaagaaagaaaagaagtgacaaagactggaattcagagtcagattgactagaatgcagttggtctgttgggtaatttacacacaagtcctgtccagagttcctgtggtaactccacccattggttcaagtggacataggcctgatggaaaaatgtgcaatctccttcatttatatccttgagcaagttacttctctgactttcagtttcttcatcggtaagatgggagataataatccccatgatctaatgtggttgtgagaagtaaatgaggtagctaatatatgttagcatccagcgaccaatgcctggtgttaactggtgctaaactgaggctaggttcttcctttggaaggaattttcctaggttgcttggaggagagagtctgactctatcaagataaagatcatatgtggttgcagttgtaggaaccttgatagttcttgttattgtaattaattgtaggtaattaactgcaatgttaacagtttggaaaaagaaaacaggcaggagaattcttaaacaatgtcatcaaacaaggtgggcagatttgtctccgctagcctcacaggcaaagcttttaggagttgctggctggctgtgatttcttccttttcccactctaaggctctcatcctgcaacagacccacaaaatgtgattctccatgggcctttcgggggaaatgtccagttgtcattgctgtaatctgacttggcagagagttctttttgctgtcagtcgtgctatctccagggcagactgggtgtttggtctcctccagtctcacagataaacacccttctccctaaccagagtgagggttcatgccgagcctctggcaggaggaagcccctggtttggagcctcattgtaccatagaaggaggttcatgacccattggatgtgattggccttgtcatgcaataccctgtgcccttgggtgaccttgagtcattgcatatgagcagttgtgtgcccagggccctggtcacttctctgggtctcgcccttcagggataccacaaattttcatcattcaagagtaagggattagtggattgaggtcagtgggttctactgttctactagcttgcctacggagccctaagggagaacctcaacccccctgcatgtcagtttccttagctacatttttccccaaaggacgctaaaatggtgtacttcacaggccccctccatccttacaactgaagcaaggtgggctgcatgtccaggtgggtaggtcagactgactggggggactgggtagtgcctcactagaaaatatcaatcttattcattccattctaggtggggcaatgctactgctttagaatagtggtctggtctctggcatcaggctgcctacctgggtttttgaaacccagatctaccatgtgctacctgtgtgacctgggacagattctttaagctgctctcatcagctgtgtaatagggttatcatgaagatgaaatgggttgaaatgtgtaaagtgcttggaatggtacctgccacagtgttacttgtaaatattgaaaggaaggcatagttgatagtatcagacaggtctgtgtatcagacccagttctaccatgtagttgctagcctaaataagttccttaatatttctttgctttggtttcatcagctgggaaatgaaatacttcccagactcagagctgttgggaggaataattgaaataattacatggaaagtgcctggcatattttaaatgttcagtgagtgttaactattgttatattattttaaacatttttatattgcttacagttagacatcttaggtcatgctactatctggatgtaataatgatggaaacggtagtacgttgagggccaaagactgagcaaaaaaagatttcccaaaaggctcccaaaggcagaggaggaaaacctgttaacaaagattgtgttgtttctcttggagttccagggtagagtggctgccagtggaaatgcctggtctttcataaacctgtggggagtgggcttctgtgatgtgagtaaacagcgggtcttcctggagcggtgatttcctggcttcacctgtcactgtctccttgtctccaagaccttggctaagacttcctttctatatttgaattcctcacttaaagtggagaaaatagggtctggtgggatcttgactactttttttttcctttcactctcttgaccaggatacgatcttgactactcgaaatgccgtctgtaagatgctggcaaggcgaggacacataagagatgctctaaagtgtgtcctcctcattgcctcagtattcatggacttcccagtagcatacaactattcctaatatttatgtactgacattacatagactctcttttatgtggttggcaaatttattgtcctctgacaatgcctccaaagtatcaaaggcttttcaaaactgtttggaaggaagactgtgtcactgttcctgggttaatatgatttaatcattaactatccccaaagaatagggttgacatgaaaaccataaaaaaaccataaaatgtggaaaactacactgagctgaaatcaggaacagaaaacgtttgttgtctcccgtaaactttctgtgtttaccctttcctccattttgttctgtgtgacatgaggacaccacagtgacctatttggttagttacacagatacacacttcagatcagtaagaggaagaactttctatgaattagagttgtccgaaaatgtagtaggttgccttttgggatactgagtttcttgtcactgaaggtgatcattttttttggcatatttagtgcatggtgtatgtttgctggatgagtgaatgaattaataaatgaatgacaaagaggatttgtgtttttcagctgcacatacactcatctgtaaagtgaagattaccttaatgatctcataggattattttagattaaatgaaaaaacatgttgaatacccagcacagtatcttgcatattgcaaactgctcattaaatagtaataatcattattttttattttatattctaaaaagaatttctgcctcaggtagaaggtagacaagatgatccaccaatttgagatttgcagtttttacaatcatctgtttactcttgttctctttgcctttgcccttcttcacctatccatctgaaagaacttctctctgctctagaaagccaagttccttggcatggtaggctgactagtacacttctaacagtgggagcaagttctatcccaattaaccggggacatttttggtaacatcactaatttgtgacttagaatatgtggacttagactccatgatttttttcaagtgactcttatttgcttcttgtgtttgacgcatttgtcacaggcacacaaaagacttcaccagcagcagagtcgaaactctccaagaattttctttaatagcttcttggcacaatagcacatgcatgatggggaggtctaaatatgtcattgctatctgctgagatgatttgcataacttgcttatgactgcttttgacagtcacgtggccttttctgaatagagcgcagcatgtttaggctcctgcatactcgcatgaatacatgagtcaccatgtgttttcagactcctcattaaatatgattgtctgacttatattacatcttccacaacatacacacactcagccattctatctgtggccttttttttttcccttgaggccctttgcaaatttagtctaacagtcatctctgaaagcatctgtattctaacttattaatgaattaaagggaaattaatacattttctaatagggtagagttgctaaatatgtagcaatctatgtggctgctgtctccaaatatttttccctatttctaagccctatagagaagtgttggaaaggatcgttgggagcattcaccccattcctgcaggaatacccctggaaatatgtaacccctgtatttctagggctgccataacaaatacccataaacttggtggcttaaaacaactcccatttattgtctcacagttctggaggctggaagtttgaaataaaggtaacagcagggccacactcctctgaaggctccaggagagggtcttctctggtctctttcagtttctagtagctctagacattccttagcttgtgggtgcataattccaatctctgcctctctcctcacatcaccttctcctctgcgtttgtgtcttctcctcctgtcttataagtgtctaaggacatctgtcattgaatttaggacccactcagataatccagaatgatctcatctcaagatcctaaacctcatgacaccttcttagatcgttttcctgtaaggtcatagtcacaggttctggggttaagacatggatatatcttttgcagggaccctcattctacccactgtatccccagctgacaaccatatacacaagctcttccaactacttatggagagatttcttgtccacttggaggctgaaatactgagcaaagtacaggcaaggagagtcagaattggcagccatcatcactaccttcatttatttctatgttcatgccacagtagtaagtgttttgtactctaaaggcctactgagttcttccagtcaacagtgtgagatatctaataagacaaaacagtaaaaaccatcatagattgcattagtaaacacatagtatcctggttaaggaagtgatcactccactgaatcctgagtcctccaaaccaaaacaggataacttcacttccaggtacgggttttcaaagggaccttaacaaactagaaggcatcctgggtagatcttttaccaccatctggactacccaggaagacaattggaagaaccaaagacaaagataaaaacaagggaggaaccacccaatgctgtctttaatttggggatgtgtgtgtcatgttttgagtaagcaaatgtgatatacgttacactgaaaggcagaacaaggccaaaggtcaaagtaacgtgggaagcactagctatttgaaaaactgaccagttctccatcagtggaagtgtttcagatagaagctggtaggtgctgtagggatcttgaaaagaggatttttctacttggtgaaaatctaagttccttaaccgatcaaaatcctatgacttctaaataaatcattttaaaacctcacatagaggtcgtcatatgggtcacatcaagagatcactactcttccttgattgacacatttgctcaggttcttctcacctggattacttcccacttgtccagatcgcatttatcattcgtgatccttcccaaggaccgtctatcccattaactttccttgattgttctgggccacatgcactctctattgtctctcctccaaagcttgtccatggctcctgtcttggggcattatacacattgccatgtattatgtattctcttgcagtgtttttacattttttttcctgtggataaactctgttttcataattagacttaaatgtattggagatgaaatggaattccctacaggaactcccacagagtttaaggccaatcccaggcatggattaggcaaagccatgacccctgtagaattgaaacacagccggaaaatgttgagaattcaaatatctttcctcatcttgtccttccctctgtaaaacttggttatctgttttaaaaaaaacaacaacaacagaaaaaaaaccatacacacataaacactttttgaaattgtttttcagctttggatgaaagaatgtcagtttgcttcttttccatacccctctgatatcagctcttcccgggatccttggtgactcctagcatgaacagagctccgaatcaatgcaaaaatactctgccttcatttgtcgttgttgttgttgttgttgttgttgttgttgttgttgttgtttgcagggggtcagttctatttcatcatgtttatggactaggaaatggaaggacatcttttctgttacagagtttttacaaacaaacccaagtatggcaccccaggggaaaggtggtaaaatctcgtcaagagaaggaacactcttctctaacctgcttatgaaaggcattccctgacttctaaaacttgcgtctaattgtctagccacttgggactcttttcgcttaaccacttcccttgtttttcccacattctgaacatctatgtcctcctttattgactccagatgtattacatggtctccctttagttcaattctcctgtaatttcttgacatgtttctgacctctttaaagaccatttaaaagggttttttttttctgtatttttgggtgtttgcaatactatacaggctaatgtcattcacagattcattaatgagtggcttagtccctcttcgagatcattgatttagaaattaagcagaagcagagctaaccacgaccttggcggcagcctgtaagcacctgcctccccactctttcctctgcagtgtatttgccccccatcatgcacacacagacacatcaccccaaacttccaacccaggttcttagtttgaagataattttattccatgtgtgactatttttatccaggtcattaatgctcctaattcttccctattacatgagagtctgtaagctaaggaatagcccacagaacactgcccatcctctgtgtatgttcatttacaattggcctttataaaattgccataagagtttgatggcacattatcgatcctgtcaagtcttactaaatttatctaaaatttaaaatgtaattgtacatttactttgtttaatacagaaagatagactttgccctaactttggcaattattttccccccagtaacctgatttaggagttacagctagggccagggcagtagttaggcagacatgcctgctgggtgaattattttagaaagagagatgaggccaccatttgaagaagtggcaggcgctggtctgtttggttcctctgtgggtatatttctgctgttcgtggtccaggatggtgtttctgactgtgatggtgatttttgcactgagctgtcaccccagtgaccagtttgaaactaagcaaccattctgccacatggagcttaatccaaattttaaagcatcatcaacaattaaaaaaaaaacaaaaaaacaaaaaatcttaagctcattttcttgaagctaaaagtaacctcagaaataatctgatatagagttagcccttgtgtgtttgaaacatgctgtaaaacaagaggttggctgaagggagtaaaatattttgaataacttttaaatgtgcaaaaattcaaagcaaacatgaatacagtagggcagagcctcacactgtttgtaaaatgtcacattccatgtggtgtccttgctggagagaactctttattacttgactgggctcgcttatgtactcatgaaacaaagctcttacaggatccggtcgttttgtgatcttttgtgagacctggccctaggttacattctttgcttctttgaagcgagtcattcctcttgccttgtgaacccttcagcaaactgttcacctgtgtgtctctgtcaagtgtaacaatcagctgaagcaacaatcaattctgaccttgggtgaagtttagtggcacacctgggaagagtttgtaattctactgttttgtcattgtagctggctggccaccaggtcaggtaaaaggaaaatatcaagatccaaaaaagtagttggtagcagagctgcatccaaaccacagttttgatattcttaggtttctaaaattaacagtgacaaggtcataattaaggtgaggcaagtgagacactcaccttcaggtgcaaaatttaaggtgcagaaaaattcagtaatcctaatgtgaatgcaatatttaaaaaaatgcaaaatgaatgcaaacaatccatgatgaacaaaagatcaaaatgtattcaaataaagacaagatcagtaagctaaagttatttagaaattgtttaagatcatcacttagttaagagaaatgatcaaacatggcaatttcctcaatcaaaaacaagatgcgtgatatggtttggctgcgtccccacccaaatctcatcttgtattgtagcttccataatccccacatgttgtgggagggacgcaaggggaggtaattgaatcatgggggcgggtttttcccatgctattcttgcgatagtgagtaagtctcatgagatatgttggttttataaagggcggttcccctgcacatgttctctcgcctgccaccatgttagacatgtttttgctcctccttcaccttccgccatgattgtgaggcttcctcagtcatatggaactgtgagtccattaaacctctttttctttataaatcacccagtcttgggtaatttcttcatagcagtatgaaaatggactaatacagtgagcaaagaggaaggtttttggaaaaaatgatgagtgtgtttcctttaaagccaggaaaacaaaactatttctaaaattgtttggagaataaataaaatatttaaacttaaattgatgttttaagttttgatatacctactcttcatgttttccacatttttcaacttccttaatgatctgaaaaaaattagccattaaaaaataaaaatgtacatatcaggacatacatttttcctttgacctcaggctgcaactgataagggtacaactgtcatggtcccgggtgaccagtatacctccttggatactttcctttttcaagtatttgtgcatcttttgggggtggggtggggacacggagcacctggagctgcaggcttcatttcctcccattgcctctccatcagttgcttgtggcctgtcactgtttaaactttttcatttatagtgaatgtcagtggaagttcttcagtatttttgtacttctgggttggaaaaattatgtctgatttatcatttgtttaaatggttttcatttcccttttcttgtgttatttactatgttggtacattttggaatgagatttatcaaagtaaaggaacgtttacaaacaaataagagagccccacattcctcagatagcaatggttctaaggattggatatacattatgagttccagtactgaactatttagccactgaagactatcttctgtttatataaatccacctaatgccactacatatttttgcattttctaagcttcattcatagccattgcttttgtttttaaaaacttcttcatttctacctttttactcgtaagatatatacctcctccaccacctccaggaattgttttctccaggcctcagggcagtgtctcctcctctacccactccagtaacagcagtagtgtgtgctattgctgcaagaaagtggatgcagtttcaggctgtctggcagtcacatcaagggaacagattccctcacttcactctggcatggagttttggagttcattctacccatacattataggagagacactgataaattggggagcttgcagaagagatttggatgtgaaagaaatactgactgaacccgaggctactcgccctgggggagaacatgggatctgtcttcaaataattaaaggacttaaaaagttaggcatattctaaagagctcctagggtaacggtggcacttgtggaaagggcaggtgaggtataggaaaggaaaattttgctcattatgtggactttttcctctattaatcaaagctatccaaaggtagaatcatctattttataaagtaataaaggcctttctcatctgtcaggcttccttttgactcagagtctgtggctatagtgtttcatctttgacaaggttaaagtgccaatgcaggacacaccgccatgtgactataaagaaggattctttttcataatatggaatcctcctcctattactagaaaactgtgactcaggcaacaatttcagagatgctttagggtcaaatcttgtcctttcaatgggaagaacacgtaaaattatcgttgccacatgccaaatgttatatttatccaattgtccttctagtggagtatgtggtttattctggcaactacatctgataaccattttctataaagccagggtgcattgaaaggagaattagcaggacaacagcacaccaaggatcccattgttctgatgagttacctgatgcagaaatgtttccacttccaaacaggctgtattccaaaggctgttcttaaatctgtctagtgcgttgacagtagacacacgatctcgaatgaccctcttggttgcaggcggcaccaactggcttttgctctggtatgtgtctttattgtcatccaggaagttcaaaatttgagaattaggcagagaagcttctatacaggttttaggctagacaataaaatcataggaaaggaagcagggattaggaccaaaaagagatgggggtttttatttttctgggtgcttttcagcactagattgggggttttggctccatatatctctaaaaatcacctctggtttctgtcctattccagatcagaaagaaggaaagggtgattcctaaggcaccacagggttatactgaaaaagtgtaagatttccaccgtacccatcatacacgtacgtaaggagggaatcaatccactccactactctttcttactctaaactgccaaaacactgtatcacagctctgtctacttacttcagttagggccagagatgctgatggctgatacattcagtaaatttatatggacacaaagctgacaggccctctctcttacttttggtgggagaaactagcttaccttttcaggcttaatgatttttgataatttcttctccattcagcagcaaggctctgatatgtctgaaaacgtgatacatcatacatgtttataagctatacactgcaaataagaaccaccagggagatattaatcatattttttaagtctacctggttctttcccttagagccaaaactgcttgttcagtcaattatctcataatctgtttctattcatgtaggctttatttagtctaaaataaagtcagaaaatatatacagcagtgtttacattaacataatattaagaatttggtttatccacatgggtaagtgccagggaattcaaattgctctcagaaagaaaaagaaaggaagggaaaagataaaagaaaattggaggtggagctaaatctgccatttttgcttactccattccattcattctgcctcagcactcagtgaaatcaaggaatctttttcttcagagatctttgacatatctacagtcatggaccccataacgacatgttggtcaatgacagactccacatatgatggtgatcccataagattaaaatactgtttttactgtaccttttctatgtttagatatataaatacttaccattgtgttacagttgcctacagtatttggtacagttacatgctgtacaggtttgcagcgtaagagccatagactacacatctatatggtgtatagtcagctataccgtgaaggtgtgtgtaagtgcactctatgatgttcacccaaggaccaaatcgcctaacaatgcacctctcagaacatatccccatcattaagcaacacatgattctacttgcaatagagcctgaagagatttaaagctttctaatttcctgggtctcttgtatttaatgagttacattattgggattctgactagccataatcaagaaagattctgggagacaaagtagggaagtaggagcagaaacttggagtcagacagcccctgcctgttttgtttctttttttggtgtgattgacaagttatttaccctctgcatttcagtttcctatgccatttgtgaggattgaataacataatatactataatataaggcccctagcacagtgcctggcgcatggtaaatattcaaagaactgttagatgaaaaaaggatttttcccaaacatcaaatcatcaaaaacaaaacaaaacataaaaacctcacttgattagcacagaatcatagaactctatttctggaagggactgttgtacacgatctagtctggtggtttgcaagttttttttaaaagctaggattctttgaccagaatattaagaggaacatgatgcattaaggaaataatggcaggcggggtgtggtggctcacatctgtaaccctagaactttgggaggctaagatgggaggattgcttgaggccagg

SEQ ID NO: 3150 - DNA, 11772 bp, Homo sapiens
cccaggtgtaagtttgaagtatctttttagctaaaatttggataaatcaaatccatttgtataaaaacaatttgaaatccagatttattgcctacaatctgaaatgcaacatatggggcacagctcccattcctttgttgctacgtgtgtgttcttcattctcttggaaaaggccccaagggtgcagaaagcagagggacacagagaaaagactccatttcacctactgcctgaacttctttgtggttctatgctatggttaggatcagagagataaggcttttgtaccaaagaaggaatttctcagctcagttgtcttcagaaaatccctgggcctagcaggcaaagatttctgttctttctagatgtctttcaaaacagtgcaatcccctaatcaaaagctctggaaacttctctacaattagaatcttctgaaattcctaagttctattcactgtccaaggtgcatacatctccacataactgtctttttgttgttgttgttgctgccttacttattttgatgaattgagcctcaataggtacatttctagaatttgtgctatttgagcccttgggaatttgtgaactattattttagaataaaaatgagcacactcagcattagaagatatcaaagggtgagacctcatttagaaaggagaagaggcagtggtctattgtcttctctacatttaattttggctttagggtactgtcaggtccatgaaagccagtagtcctgaaattggcctaactgtgcatgctcccacctcattgtcctttgaaaaagattcatataagtctttcctttttacattttatgtgctgaacttttcattatcaaatagagtgtcttgtggccttctgaaaatacttttcaaattagaggaagtttgttgttacttttctcttatgaaatagtaacaaacccttatcacacacaacacttattctgtgtgacagacacagtcctaagcactttgcatagattgctccacaatagccctgtgacaaggatactgttatcagtctcattttatagataagaaaattgcgatgcctagaggtgaagtaacaggcttggcatcacacaaacaattaggggcagggatgtgatttcaacccaagcaatgtggctcccactagtctcagagccactcaaagtgagttagacatataattagcttctgtgatctggtaccctgaggggtcagaaagacctggggctttgtattccaattgtctggagtttaattttggaactgtggtaatactataaagccattctcagttactataatggaaagaactcctttctaaagtaaaccaagcaacatatatctaggtctgtgataaataaaattgatattgtatgtttccttgaaggtaaatagagtggaaaaatatatatcgtagtatcactatagcaactgtattttgtatcagttcaagtttctgagctttaatttgaaagaatgacaaaataaggatttggaagcctgaatcaaaggaatgacattcgtattagaaagtatgaattagaatctggactaattgcaatgaagtatgaattagaatctggatgaattaattttaatatataaaaatattctaaatgaaaaccatgcatccaagagtaccatggcccatacagaaaagttgatctgctatccccaccagcacctggtcctctacaaattattatctacaaaagtggatgtcactgaagtcaaaatagaaagtcaacagatctgaaaccatggtgatgcaggaaaatgatgagtcgttccccataatcctgtgccttcttgaggtcaaggtaatattgctcccaaatgtcattcagttctgtggcatcaaaaggtacctgctatgcactaggcagagaccaccaacctctggatgggcttggaacccaagtctctaaaggtgaaaggtcacagcctcacctcacaacactgccttgggcctgtttcttattaccaaataatttccagaaggagatcaggcttgagcctgattttccagtagctgtgcaggggagaaaaagagtttggaaaggaggactgctgttctcagtgactgattgtgagaacaagagtagtgtcaggaaaaaaggccactctcccccggccctagtcacaggataaattgcagtgctcctggctgctcctcagaggaaagaggcttattggcaggagataggaggcaatgaggatccaccaactgacggaccagcaaattcccaggaccccgttcaataaagccactgacaggcacagtccccaaagaagagaggtgaaaaccacattcgtgtacctgaggtgaaagaccaccattaaaaataagtaagaaactccaaatgtgtaaatcctatataagccaaaccatatggtataaaatgaatacattttctccctctacctttggcaaaatggtttcttactggattttatatacaggaaagtattaacccaccttttgccatgtagtttctccctgatatatggcattgataatataagtagttcaatgatacttccactgtttgtgtagctctgcgtataaaaagaatgctgtgcacatagtagaagtgctaaaatcctggggtaacacctcatacattagtggccttccatggtgaacaaagtcatttttcaagcaagtcataaagtagcctaaaacacaagtgtttcagtgtttgctccaaatgaggcagtggtccggggactgccgttcatctgacatcatttctgacacagccagcgctggtttggtatctgattaggactccccgccacagtggtgccagacttactactttaagtgaggtggctgagggaaattaatgtgtcagagttaccaggaggcgagagtgtttgcttcaagtttcctttggaaagcttcagctggaattgcctttgattctttccaagagaatcttttgaagctatttatggagcttggtaataggtgaagatgagctaccaacaggaaactcagctagcatcaaaagtcaagcgtgcagatgtgcaacgatatttctagacaaaagtggtcaaattactgacttgtttagaggatgccttggggtctcctggcaagtgaagtagccattttcctcaaggctgaattttcatgatgcaccctgcacccgctgctttgttctggagaatcgtatatgccctcttgatgtcaatgtatttcccttaaaatataagtgaaatgctgcgtacttcactgatgcatgagaatattggatagaaatacccataatgtgctttgaaactttttgatgaaaagatgaggtatacttaaaagtattaactctgtaatgtgttcctttccatcccttctcaccctcttggcctaggtatacacataaaacttatcccaattcccagccctcttcacttccactttctgggaaaactatgggaactgtggatggaagattctgtggtgcatattttctttcttcaactgaagcaatgtacacaaaagaaatctataaatcttaaagtcagccagaaatatcagttgctattatctttttttgttttagaaaatatagcataagaatacatgctttggatcagacagatctggtctcaaatcctggctctgccatttactcacacatatgtacagctcaagcatgcatgtatgcattcacatacacagacattgacacatgcatgcatgagtacagtcacacactcctcatgcatatgttcaaatagatgctcactcatacatgctcacacacatgtatattcatggacactcattatatacctgaagcttaaacacacaattcacttattctttgcagttacgtatgaccagcagttctgcagctatacttgagcatgattctgtgctctccagaaggacactttattttaaatcttttatatagcacaggaagctttttctcttagtttaaaggccaacaacatcaatttgcagctagaagattgagtttaaatcccacctccactacacagtagctgtgtgaccttggataaattactaagcttgtgtatctctctctcctcatttgtaaatcgggaatttatctcacaagattgagatagatactattattattcccgacttacaaatcaggaataagccattcagaaaagtgcttggcacatagtaagtgcatgtatttatttgctattaatattaaggaatgaaactcagcacagctagaaggaagatttctgttccaacacagccttgaatgcaatttctatgtgtaaatgaaatgtatttcatgtgaaataacaaacattcagatcaggtcatcttaatactacacatgacaaagatgtatagtttaataaattttgggctttgctggtttatccacagagagggtcaggtctgtgctcaagtgtctttcagaagacatgagcatcttaggctcaaactcttcaggagatgagagtctgcagccctattaacagcctctaattgcctcaaggttcattttaagctctaattctaaaagtacaatgataggcaagtatctgccctctcagaaatcttagagactgggtggggcactaaacctgaaaggatatagagtccatgtttaatatctattctcttgagtgatatacatactcatcatacttgttagtactctatttccctcctaccaaaaactcttacatagctatatcattttgttttataattagagttgctttgagttaataaaaactatactaaaatgtttattttcttgcacgttctttttatacaattatgatgcactttagagagataaatagtgcctgaatttggaattctgggactgaacaatcagccttatgggatgtgaaaagaagagaaaggcatgagttgagtaacataagtaagcaagatttaaagaaatactaactcccaaattaacatttttggttattaattctgaattactcagcattacagcctactgtaaccttgatttccagcaggcttgaaaagagatctttcatcaactcgagtgaaactttcttttgtaaaaaataccctttgacctaggttacttcaggtctacatgacagttgaataagtacatccttgcagctttacatcttagatagaaaactatatctgtgtcttcgctcttctaaaacctgctattgaagcagtttcataagagttcataccccttcactcttcctagggagccatggagagcctgcagctgaggtactggctttcccgcagctagaagtctctagtcactttagcaactcatcacctgcttcccatttttttaaaagagtgtgaactgcttgaagttttcagataaatataataatgcctatatttacccaattaaccatttctttctttgagataccctgcctccaaaaatatttgatataaattatttttggaaaaggtttagagttttgaataaattacaattaaacagttatatttaaacaaaacttaacaaagtatataaataggaataaatgataagaatggaaataattttttaaataatctactacttatcaggtattattctttatttagattattttacttaatccctacaacaagcctgtaagtgagttacaagttgttaaggataaggaaacaaaggaattatctaaggtcattcattatatgtgtaagagatgagatttttttctagattgaagcaactaaatattctgcttttctaatatagaaatactttatgaatattttaagcatgctacttatttttagtatcattattttttaaatctagatttattaagggcttagtatgtactgtgcataatgaaaaataggattctcatttttaaagattttataatttggttggagagagaaggcacacaactcatactctcaataatcatgtcactctgtaaaccagaatgtggttgtttgtccaaataagtggggcaaataggagtaaagaaaactaggtcagtatgcatctgtggaaaacctcttggaggaaaggcaatcaaaccaggtcccaaggatgggcagcaatgtatgagaagaaggcagaagctatcaccaacctggggttggagctctgtactgtgcattcaggtgacgacagggaagctccccagcactaacaatgtgctctgatagaagagtagtgacaagtagagggatgaccagattgactaggcttgaaattccagttggagagtctggacttaatgacataagcaaagaagataatatcagaattttatgaacactaaagagtcataatgatggcagtatttaaaaatatttatgggaccaaaaaggactgtaattgactatacagtttggaggataattaggacaatttaggcttgaggtgatgaagtctggcccaaggtgatagtacacatataaagggggaaaacagaacctgaggactcattagatgtatgagatctaggggaaatgttcagtgataattgtttgatttgaagaaatagttttacaatgtatttgattacacaggagaagctatcttatctgataaaattgatactggtatttggttgtataagtgagtaagttaaaaaaggaaattactagaaaaaataatatataaatgtagattaagcatttttagttattttgaaaataataaatgctcatgcctttaccaatatttaatccaattccaagatttcctttcatgaatatgtttattgggggtctaaatcatccttttttgtgtgtgtaaatcacacacttacagcacgatttacaattccaagtgcttctttaagtgaattcaaaacttaaaaacaattccaaaacaatatgattttaaaaatttatctacattttgttttttccaacctctcaagttatatcacctgtatcacattctacagcagtcaattcagtgacttgctttactaactctttccaaagcactccttttatttttcatagaaaaaatatctttttgcactatttcattgatttatataatttctaattatatatgtataataacaagtacaactggcataaataagtttagaaaaatgcaattgactctcgatttgaagatgattcaagcagtgaccacgggagtgcatgggatcctagagcaaaagcttgtaggtggggtgggaaccctcaatggccgccaagcagcagtcactgtgttgtattcatagaatggaagcactagttcatgcagcaatccagcaaaacagagactggtgaagagcttatattgctccacagaaaacacattcctaaaagttaaaggtaattgatatttatggtagttattgtgtgcattaaaatggaacttgacatgaagtgtttctcatttcattataagagaacagcttgactttaaaaatataaacgcttcatattttctctgggggaattgttagtttaaaacacaacaaagaacaaacctaacaattcctaaacttacagcaaaaccagggctgtaagcagataagaaataattagaatgtgctattataaggtaataagtttaaaaagtatatttaagtcatagttgcactcatttcccatattcttattttgtttttgtttttgtttttgtttttgagacggagtctcgctccatcgcccaggttcatcgcaggcgcgatctcggctcactgcaagctccgcctcccaggttcacgccattctcctgcctcagccccagagtagctgggactacaggcacccgccaccacgcccagctaattttttgtatttttagtagagacggggttttaccgtgttatccaggatggtctcgatctcctgacctcgtgatccgcccgcctcggcctcccaaagtgctgggaatataggcgtgagccaccacgcccggcctcatttcccatattctttacagattaccccaaaggaacatctacttgttttttaaaaagtatgttttctcagttcttataaaattataaaatattaatttgtgaaacctactttaggaattttttacaactatcaaaaacacaaatgtgctgggtattctagtttcctaaagaagtgaagtggagccaaaaagttaccatgcactgtatttcctcgaagtcaccctaaaggtccacaaaagcaaaggctatcataaagcataatatcccaaagtttcgtctttgacttgatgcttctatatctactatgtcatctcactctcttttaaatctaagtcttccatggatatatctgaatgactgagccttggtcatgtgctggctctctagctacaatgacaggctggttaagctaatttcttgctctacatgggcatttcagacctcaaatatttaaaagttcccaagcatagggtcttaaaattatagtttataataattgtacacaacagccagtaatcagctcatgctatcacatatcaaaatgaatcattttttaagggttaaggatataagtgtgaatatcttagctcccgattttaaaatataatcaaatttaacaaagatcaaattatctaaatatcaaaaacaacataagaaaactcaagtgcattaatcattaaagattattctctacgattttatcttttaagcccctatatgtgatatccatgtcacatttagtcttttgagagattttcaaaaatccactttattgggtatgtttcattttacaagcattgggatgaccattaaacaactctttggttgctcagaaatttttaattatggcaggatggataggcatgcaatgtaacaccaaaaaatagcaattcattactttgatgacactgtacttaagaagcaagggagtttgttgctgagtactttagccgataaagcattcatttttcacctcctctcagatctcagttttggctgcctctgattccttaagtaaaattaattttgttatgtcgactatgctaccattagttgataatccaggaggcaagagatgccatgcatatttcatcattccttcgcatcacagtggttctgaacatgggctgaatatagacatcgcaggtgtgcttcgagatgactaacttaaactttagctcagaatttttaaaagctggataaattgttgacagtttgagtagaaccagtgagacgtttgggttaataattccaatttctataagggaaaatattgtcagatttaacaagattaacataaggatgttctatggtcactggattaagaattcatgtatgtttcttacattaactttgtgggaatataaattactttgggagttttagtgttctgtgtttgccccccattaggacctatgaagtccttcaggttagagatgaaatcctaaatgtctagtatgatgcttagcacagagcacgtgctcaaaacatgtgggcagaaacaggagtctaacttgcatgagggctaaatgatcccactaggaacaggatcaaagagggttttggaaggaatgatcaggccctggaatgcaggaattaagattgaaaagatgacagaaggagctttccaggagtatctcagatagacaggaagctcatttagaaataagaaataatgagatgtctgagttttatcctaggctgctgattgagttgaaggcagagtgcactaccctgttaggtgagtgcttttttggtaccactcaaatgtcctctgactcagccttgggaaaggttgtgacaagttccttgagtgaggggcattagaaaaccgaaagaaagagatagctttttccaacagacttgaaaatctggggggaaaaagtcaactggaaagcactttgggactttgacaacaagttgtaagggcagaggagagcctggagatccaccctagctacacatctttgcgataggactggccctgagggttgggcatgacattcctaatcacagtccctatacctgggattgagatgaagatagtgtcactcaccaaggggatctagacgggatgatgagtaacattagctccccatcagggctgacaagtggttgagtgaagataagtgccatgggcagcagcataaagaggtaaactgccaccaaggaggatgtgtgagccacatggaatctatctgggaatgaggatggcctttacgggaaaactccaatgtgtttctgcactcagacccaaagaccaattatattactattgcagtaaatttactcacactacgattacacaaatttattgacactacaacttagatataaagaaaaaatgtagttaacttattttgtctcccaactggtctctcaagagcacttacgggtattaagacacagagaaaaggtactttttcctgtttcccattcaaactcttggagaaagattgccttttagactgccctgtgccactctgaaacatgaccacctcaaatttggtggctccatgcaatcaggcagaagaaaaccttgatgcaacgctttcttgggctgctttagattgcacctaataaataatctggatgacaccaagaagttcccacaggtccctgggtggggctgggaaggtggatgagttgccaacgaatggacctgtcattggacctgcctcaggtaaaggtgaggtgattccacagaaggagtcaggagtgaaacgcctagcagggagctagatggagaatgaggaatggatgaggcttttttatgtgctgccctagattttcttggcctctcccatctcctttctcttttgctccttgctcacaaaagagactagctgctgtgtcttatatctcattagaaaggtgattgaatcatccttcagagtgacttaataacatttaaacaataatattatgataacatataatgaacataataaacgttatttctgagtagcccccaaagcaagatatctctttaataattaaaatttcgagataagaaaatgatgcttgcattgggaccataacataatgttttttctttgtcgtctctgcatataaaagtaatttcagtctacctgtaagagcagcatttgcattatggaagtttttgtttgtttgtttgtttttgtttgagatggagtttcacccttgttgtccagactggagtgcaatggcgcgatctcggctcccggcaacctccgtctcccaggttcaagcaattctcctgcctcagcctcccaagtagctaggattacaggcatgtgccaccacgcccggctaattttggattttgtagtagagacggggtttctccctgttggtgaagctggcctcaaactcgcgacctcaggtattcgatgagatcaggagcatgcccagctctccactgcgggcttcatgtaagaggagagccatgataatgtattgcattattcttgtacagtaatcaggtatgttgtttctctacacataagttgaatagaacagctctttttcattttcaagtttattgagtctgactctatcacctaccagtcaaataatctgcctaccatgtgttcaataactatgattcaaatcctccatgaatcacctctgggtcaatgttggggcgaaaagaaattcataaaaatggtaaattcctgtagccttccagtggttcgctctttctgtctctgacttcctttttcacttcatcgaccctgtcattagctctactttcaattcattgaggagaaaaataaaagggatggaaaaattacacacatgtgttgtggcatgtagtaatcaatgttttaggtagatactttttacgattgccctgttgaattcatgctacaactggctcctgctggtggtaagaatatagctg

SEQ ID NO: 3151 - DNA, 4893 bp, Homo sapiens
gtgtgaggtgcgcggtgtgatcgtgcgctgtgtgtgaggtgcacgctgcgtgatcgtgtgctgtgagtgaggtgcgcgccgcgtgatcgtgtgctgtgtgaggtgcgcgccgcgtgatcgtgtgctgtgtgaggtgaggtgcgcgccgcgtgattgtgcgctgtgtgagtgaggtgcgcgccgcgtgatcgtgtgctgtgtgagtgaggtgcaggccacgtgatcgtgcgctgtgtgtgtgtgaggtgcgcactgcgtgaccgtgcgctgcatgtgagtgaggtgtgcgccgcgtgatttgggaagaggcttctgcaatgggcaggcttctgggtacatcacttaattcgttcaggccggctcctacctgctgtccagtgatgaagtctccacacaggaacaggttcatgctggcgatgactatgatgtggggtatcgctgggtactcagaatccttttgtgtatcaaaagctggaatgcttcaaatttttcataagtgccttgttttccttttaacattgatctggaaacagtgctgtctgcaaagctgaggcccactcctctctgctggggatcaggggtttcagaaggcaggggccatgctgggccactgtcctgtacaagcagcctggcctccttcacgctgccagggcatctggcgcagggcatgctttctcattcatagtctgctttgaaagtcttggttttaggagaggttcaggttggtcttgctggcatcttcacctaaaatagggtctggcagacaggcccatgcgctgcatcctgcccacggcctgatagatggcctgtgaatggcttttttacattttaaaagtggttgaaaacaaattaaaaatatatttcatgacatgaaaatcatgaaattcacatttcattatctgagaataaacttttatggatgcagccatgcctgtctgtccatgtcttatctgtgtctgctttgtgctacggctgcagagtggagtggctgggactgagacggaacgccctcctcacggggccgcgtctctccaccaggaccgcggggctactctgaggctctgcttcttccccagcggggttggcttcctgctattcctcagcatcctgccttggtcctgagttggtccctctgccaagagccgtttctgtgtctcagtggatggcgcagctgccttcttgctggtaccttgactgatagactggttcctgttcacctgcccgaagtcatcccagaaatacctcttacagttgcatgggttgaacccagctccgcgtgtatttagagttttgtctcttgccccttcacccagaacagcagcacccaccaccttcccgtcccctgtgactgcctcgcaactgggtctgttctgtgagatgtcgccaccctgtttgccatctgggaggatctcactccttcaatttaatctgctctcttccgttatttttttagtttctatgtattttacttttaggacattccttggactttgttctacctctttaattgatgaagaaaatttggtcattgtatctggtttttttttttgagacagagtctcgctctgttgcccaggctggagtgcggtggcacaatctcggctcactgcaacctccacctcactgcaacctccgcctcccgggttcaagcgattctcctacctcagcctcccgagtagctggattacaggctcctgccaccacgcctggctaatttttgtatttttagtagagatggggttttgccatgtttgccaggctggtctccaactcctgacctcaggtgatcctctcgcctcgcactcccaaagtgctgggattataggtgtcagccactgcacccaatctattgtatttaattctaagcactttcttccagacggtctcactctgtcacccaggctgaagtgcagtggtgtgatctcagctcacagcagcctcaacctcccaggctcaagcagtcctcccaccttggcctcccagagtgctgggattacaggcacgagccattatgcccagcccgtctttcttcattttgattacagtgtgcgtactgtacatccgagaagtgcatgtgaaatgctggaactgggatttcagcaactgaatgcacgtgtgtgactacccacgagaagcaggacacttagcacctgctgagaagcccccacgcccatgttcccttctaggcactgcacaggcatgctggccggcctgacctcagtttccctcttgctgtggccgcttctgctccactctctgtgaggctcatccaccttgttgcctgtggttgtggattgttcattctcagtgctctgtatgccaagtactccattgtgtgaaaatcccacagcacgttcattctattatcaatgggcatttgggtagtttccacagtttggctgttaggaatagtgcagtgatgaacatgctggcacctgtcttctgttttttttttatttttagagacagggtcttgctctgttacccaggctggagtgcagtggtgtgaccttggctcgctgggcctcctgggctcaagcgatcctcccacctcagtctcctgagtagctgggactgcaggtgtgtgcctgcgtgctggctaatttttgtagtttttgtagagatggtgtcttgctctgctgcccaggctggtctcgaacttctggcctcaagcagtcctcctgccttagtttcccaaagcactgggattacaggtgtgagccactgcccccggccagcacccgtcttctggaacatttgtaagcatttctgttgggtgtgtacttgcgcgtggaattgctggctctcagttatgcacatttcttagaagatcctgccagtccttcatcccagaccccgaccccagcgtggaaaacgcagtgcatcctcaacgcctagtgtttgcggctgtggcggctcatgatcgacttggaaggcccacagtgtgtggtgtggagttttgcagggagccagtgacactgcccaccttcgatccagacctaaccttgatcctgttctctgaggccaccttaccaaaaccttgacttacccgtcttagatcacttaccctgggggaaatgtgccgcaagctcacgagggcactcagccagcctacaaaggttaccatggcagagaactgaggcctcctgccagcagccagcagcagctgaccagccgcgagggcccctccgggaaggagagctttctgtgtttcttcctgtaccccatatatgttgacgtgatacgttttactttctgatttcccttgtgagatctttggtctgtgggttatttggaagtatggtttaatttccaaacatttagggttttcctccagattttgttgttgtttctggtttctggttttaattccactgtggtctcagaatatactttgctgacttccctctctttagatttgttgagccctgttttgtgcttcatagtgggagggtgattgtatgtgcacgtgcagatatgtgtggcccccacacggtatctccagctatccgtgtcttgcctctccgtgcccagtgcacccttctcagccctgccgtgtgaccctgggctgggccctccctgtaccctcctttgcaggttggcacagtgtttggctctgtcactggaaggagctggagggactccacaggagggaggggcctgccctcctggttccagtgtgcttgcttttcctggcttccgtggtgtgtgcctgccagcctcatggtgggggcgggggctctcagtgacagtctgcaggagtttagcaacacccaggttcattcaccacggtgggaaggattcctgctaagcttccttgcctctgtccagctcccagggcgtctgcctccctcctgccccagggagagcttctgggtgagtctcgctggcactcctgccccgggcttcctgctctcaggccttggcctgctgcaccttggccaactgcaccacccggcacatcatagccccactcaggtcagagctgcgtctcagccgacgtggggttccgaggttctcaccaagatccagactcaacgcttgtgggtttgttgtctcagtcctggcggtggaggttctcccgaggcctcagcgcctccgttctcggaagtctctttacatgttagtggaaccctctgttcctgttgaatcattcttcgtgttaaatgtttctatctcttgactgatacatgatagtcatcatgtatgtattctgcggctgcttttgtttttttctctttatccctggttttctgtaatttgataagctttagggtatgtgtgtgtgttttgggggtttgtcaagatttgtaggctttgtcatttttatgcaatttggaaatattctagctattcggtctcttcccctgcctcctgcagtcccaggtactcgaatgggctgcttgctgtggactcatgggtccgtgagtctgctcatcttcttcagtttgcgtttcatttttggtagattctgtttccacgtcttcaagcccactgatcttttaagctgctgttaagctatggccattttctgtatgagccattgtgttttttcatctctataaatttggttttggtatttaaaaaaatgtcttccagctaggctggcggctcacacctgtgatcccaacactttgggaagttgaggcagggggattgcttgagcccaggagtttgagactagcctgggcaatacagtgagacctcatctttaaaaataattaaaaaggtcaggtgcggtggctcacgcctgtaatcccagcattttgggaggacagtggatcacaaggttaggagtttgagaccagcttggccaatatggtgaaaccctgtctctactaaaaatataaaaaattagctgggcacatgcctgttgtcccagttatttgagag

SEQ ID NO: 3152 - DNA, 4183 bp, Homo sapiens
gttccctacccgttaattagccaggccgctgcccacattgtcacaaacattatattaactgaaaaactggcccatgccatattccattatgagaaattattttaaattcgattaaattccaatgtttattcagaaaacctggtagagattgaattgctctatgtacctttcttagttttcttcttcatagcatattttgaccatttatcttctacacctggctgacctgcatggtccttgtagtgtaacttctacttggtgtttgcgctttgctttgttttcaaatttaaattgtgagatacatttttaaacctatctaagaaatagccctgatattgaaatggcttctgtggaataggtttgacagatgtaagtctttgattctttggctttggtttttgtgcttgttacagttttacacacattcattcagaggaagacattaccatcaatgtgttgtttcttttttcaaattccagtatgtttttaaagacccatatttcactaagcagtgtacttgttgaaactgatgtgagtgactttatgtttccacatgtgatagagcatcagatactggagtttgccaggggtagaatggttggattcaggaatgtttagctgactcatagcaggaagttacactgtaaaaaaatgaagcaaggcagggaagacagatttaagtaccatgcagctcaaaacgacaactacattgtcattttcattgtgaatacttttaggttctatattggctgtgatctttgtactaactggtattatggagaatgtgttggcatcgcagaaaaggaggctaagaaaatggatgtgtacatctgtaatgattgtaaacaggcacaagagggcagcagtgaggaattgtactgtatctgcagaacaccttatgatgagtcacagtgagttctgataagagcatcacatttaataatttaggaagccaaattgctctgactggttacttatttactttaaaataaaaagcagattttttctacatttgttatacacttacgttacaaattccttttcattttttttttctctttttccctttttacctacccttcaaaatttatcttgcttcatagtgaatgtttgagacacattggggaaaatgtggtttaatggtagatttgattcttcaatatgtaacatagaaattaatgagattaaaatagcctgacttgtttggactttatcagtgtttgaaatggtgctttattgcaggttagaaaaacactaatttgggtataagctttgagactctgttattaccttacaggattttgaactcccatatggtacagtactagttgaaagatttgtgacttgttttcagctttaaaatcaattgaatgtttcatatttatctttaaattggttctccaaaattacagtgttcttataaatttttttactgcttgttcttaacatcaaaaatactaaattaatgtactggaatgtcgatcttgaaagtattaaaaccataatactaaaactattttatatcccagggtttagcaaattttcaggtgcatgctttattataagtaacatcatcccatctgttttgaactcacatttccatttcagatcttgcagattttttattggccgtgatcggtgtcagaattggtaccatgggtgctgcattggcatcttgcaaagtgaggcagagctcattgatgagtatgtctgtccacagtgccagtcaacagaggatgccatgacagtgctcacaccactaacagagaaggatgatgaggagttgaagagggtgctccgttccttacagatgagagcccctctgtgtgcagcatttgaaaatgaaatcagccggcataattttggaagcatttctaggatttcaagtttccaatgttaggatttcaagtttccaatcttagagtgattatttactgactctcagctagtctagtgaagggcttgacaaacttcagtccttcacataccagtgtcatgagctttatcatatccccacaccacctcagcttatctaacactcagataatctaacgtgactcacttctttatacattttatttttaaagaaacttcctctcactcccatggattgagaaacagtatgattagattatagttattattttccttatgaaagacagaaagggggctgggtacgggggctcacacctgtaatcccagcactttggggggctgaggtgggcaaatcatgaggtcaggagtttgagaccagactggccaacatggtgaaaccccatctctactaaaaatacaaaaaactagccgggtgtggtggcgtgagcctgtaatcccagctactagggaggctgaggcaggagaatcgcttgaacacaggaagcagaggttgcagtgagccaagatagagccatggcactccagctcgggtgacagtgcgagactctgtctcaaaaaaaaaaaaaggaaagaaaagaaaaacaggataggtatggtttgcaggattagcaagtgatacagatgtattgaagacatagaaggccagtgtggttgctcacccctataatcccagcactttgggaggccaaggcaggaggatcacttgagtcacttagttagagaccaatctgggcaacaaagtgagaccccatctctacaaaaaataaaaataaaaaattagctgggcatgttggcacgcacttgtttatccagctactcgggaggctgaggtgagaggatcacttgagcacaggaggctacagtgagctatgatcgtgccactccactccagcctggatgacagagcgagaccctgtctcaaaacaatggggggaaataaaaggatatagtgcattggattgaaactttctcctatttttatcataatcacaagaattgaagaaactaaaaagggaatcgtagtctcaatgtgtggttgaatgttatctaacatcacatctctgccacctcatcattaatcagctgtggtaatgattccacactttgaacccatcccacctgtttacagaagcagttgcaatgccagcatcactcagtgacagctcaccatgtagggcccagaatactgcttttgtgacttctaaacttgtgttccaccccccacactgtggggaaaagaaagagagatcagattgttactgtgtctgtgtagaaagaagtagacataggagactccattttgttctgtactaagaaaaattcttctgccttgagatgctgttaatttataaccttacccccaaccccgtgctctctgagacatgtgctgtgtcaactcagggttaaatgaattaagggctgtgcaagatgtgctttgttaaacagatgcttgaaggcagcatgctccttaagagtcatcaccactccctaatctcaagtgcccagggacacaaccactgtggaaggccgcagggacctctgcctaggaaagccagagacctttgttcacgtgtttatctgctgaccttctctccactattatcccatgaccctgccacatccccctctccgagaaacacccaagaatgatcaataaatacaaagggaactcagaggccggcagcatcctccatatgctgaatgcaggtaccctgggcccccttatttctttctctatactttgtgtctttttcttttccaagtctctcgttccacttaacgagaaacacccacaggtgtggaggggcaacccaccccttcaccacaccaaggtcttccgaccaggctttgagtaccattattgcaaaggaagctcatcttaggtaacttattactagagcagaaatcacctaatgtaaagtatttcatgtatcgcatttaaaactgacttttgggttcattgatgtagtgactcaactgggaatcttaaatggaattagtgttttcactgacaataagaatgcctactttttcattataggcccataagatgtcccggcctttccttgaaccagtagaccctaatgatgcaccagattattatggtgttattaaggaacctatggattgacctttgtaaagaagaaaaacatgttagaagaaaaatggaaaagaactctgcatgccctcagctcagatgccatctcctctgggagctcctctggcccctgccaaggctggatcagatgccctcagggcacacacgatgctgatccagggccatctg

SEQ ID NO: 3153 - DNA, 4557 bp, Homo sapiens
ggcgtgtgcgcccaaggccagaggcacccgaggtgggctggcccagggtggaaagcctgggccgagcccctggagcgggcggaacggcgagccagattcaggaagttgtgcctgtgacatcaggggcaggacagagttggagcgaaacctcaactatgccaggcgtcggcccgtaggaaggcagggaacacagagggcgctgccctcggcggcagcggcagactgggcggtgatcaggatctgaatgcacagggcgggtgttcagcgattgtttactacgttgaacgtgacctccaggaaagcagttctggccgagatcccctgacaacgcaaagcaagaagtaacgtggaaggaggctccccaagctggctggccattttgctgctgtgtgtggaggtgctgccagtggcatgcccaaacccaaagctggaagaggaataaattacaagtggtcaaggttgcatccttttgagcccaggacctgcttgtaagccgagagggttctctggccctaatctagccaagcaccatggagagaatcagtgccttcttcagctctatctgggacaccatcttgaccaaacaccaagaaggcatctacaacaccatctgcctgggagtcctcctgggcctgccactcttggtgatcatcacactcctcttcatctgttgccattgctgctggagcccaccaggcaagaggggccagcagccagagaagaacaagaagaagaagaagaagaagaagaagaaggatgaagaagacctctggatctctgctcaacccaagcttctccagatggagaagagaccatcactgcctgtttagttaggcaggaagcagaggtgtttcctttctggggctaagcctccttctgaccacacacagacatttcaggaacccctgaaataatgcactatgtccatgtccacagagtaactactcaaccaaggaacaaacctcagactaagtgtcccagtggagggcagtcccagggaccacgtggacaattcttggatactgtcttggcagctatgtgtccaatagcaatgctccttactgcagacccaggcatgcctcccacctgtctctggcataccccacatgcaaagcacaaagaacatttatccatacatctcaatatggttcccaagtgtgtgcacatgcacgtaacacacacacacacaaattcaggtagcaggtacgtgggcaagtatattctgctcatcaaatggtcattggctatgtactttgtgcagggaagtacattatctacagtcacaaaaatgtctcatgggaaagccttgccagattcagacacatatatacaatttcctaaccagcaaggcccccatacaccatctattccataaaccactcaggttacagatgcatgctttcctatttctaactctacacataaacttttactggaagtactcataattggacattccagcaacctgctacagtccccacccttgtgtgtcttgatacagacacaccaagtttctgtgcctctgacccctcacctgtgccaagatgtttaaagtgtgatggttcaaaattcattgaaagctcttttcttgtaactcatgacaaagtccgtcctcattgccactgagaggtgtttaatgtgatccaagacctctctgtgaaacattacccccgcaaaccactcagcaaagtgcctttctccaagcaagaacaaagagctcttggtggtgactgctagaaaattatggaagcccactcatttatgtcagtggactgcaactgtgtacctgtgcaatgtttacagatggaaagggtgaggagatgctacacctgagctaggtatctcctatataaccaaagtttccagcagggaaggaactagacaatcatcagtgcagtctcacagaaggcaacactggaagtgatgtcataaggttgtgatgtgtgcacggtatggcacaggtgggatgcagaggtaacagagtttaaatgaaagtaggatgaagctataaagaggtttatttatatttatattgaagctcaggcaagtgccttgcacacagtaggtacttataactaactgtggttactgttggatatgtgatgttgttaagggtaagcttgtaatacctcaccagttctccccgagtgatcttctcttctaagtgagcccactaattgctgcaatggatgaaattgggtgtttaatgctggagagcacatgtaggtgacacatgtgccttgaggtatgtgaggacatgtaaattagatccacagtgagctgaggagggctttccccgccagagtgaggttgggaagcagagttaatccacttataggatgaactgcttggtatttttattgtattgtgactgtattacaaagatggacaattcactccttgggagcaagttatgctctagaagtttatttacaaatatgctgggcagctctcttgaaatattttcccaaggaagctattctacacagtggcaaaattgctatctaattaataatgtagctaaactatgatatttatagtagcaaaaaactaaattctataagattgcattaaaggaaagatatattctatttgctcacttgggctgcttggtactcacctgccctccaggtgtactttaggcctgtggagggtgggcatttagtggtgacccttgcaccagggttttctaacagatgaccctgtgaatcataatttaaacctgcatatattttatagccagtcacatttgccctctcaccctatatggccataaactgcctaagcactcaggcctcccactcatcaacccctttgaccagagaaagaagcactctggttctctatccccttgtcacatagagagtttgtcatggggcctctggctgtgcccttcacataacagaatgacttgccatctgcctgcaccaaacccagggatgtggaagacatctccccacaactgccactgctcaccaggacaagctgcccttcctgtctccacctctcagtccccctagaatggatggctggggagaggtggaggctgacagctgagacgtagtgtcagatatgatctaggagggcggatcaccgggatccgggaccatacaagtaacatggtttccatggcaactgcttgctcctttgaattaagacagcagtcagttgtcattgccatgacaaggcctctatctccaggcacaatgtccctgctgtctcctaatccaatggacttgctctcaccccagggatgaaacacccagaaactcacttctcagtcacttccacagccgatgactcagaagagccaaacccagaatggggcctctcttttccccatcacagactcccctgacaacctttcctggcgtaactagaggagtcccagtgcaggataggccctaaacgttttgttaaataaacaggtgcatgaaaggagcctaaggccattgttgatatccactctcttctttccacttccttctcatctttttctccatgttttatgcttctctgattccctcttctgcctgcaccagaccagccccagccctttattcctctccattttcactccttccagcctctgtccctgaactgccactggcaacccatgggacctcaggaccagagactgcttgactcatctggggagggtaagttcacgggggacaaaaaaatgattcctaaagaagaggcttcctagaccagcacaggctcgagaaagacatcccctaggcctggacttctgagcagctttagccaggctccggacggcagccagaggaggcctttccccattgctcctttccccattgctcaatggattccatgtttctttttcttggggggagcagggagggagaaaggtagaaaaatggcagccacctttccaagaaaaatataaagggtccaagctgtatagtatttgtcagtatttttttctgtaaaattcaaacacacacaaaagaaaaatttatttaaataaaatactttgaaaatgaaaagtcttgatgtagtcagatggttactctcttaacattaggtattacccccactcagacatcactcagaaatgatcaatgcagggactctttctgtgacacaaatgtcccagccctccctggtcaccgccttcgccatggtagagtcataggtctgaggatgaggaatgtggctgtctcacccttgcttgcaaaacagatggccttggagaccagactccctcaaaggtgccagctacaggaaaaatatactgatgttccttggcaacacttacagaactttccatcaatgaggtccatcaatggcttcttaaaggaaaaggggggaaatagcaaaaacctaaggaagaatggacctttgagttaaatccagtgtttgttgggaaaggagggatcaaaaacctctatagtagccactagggcaaaaactgtgtgtatgtgtgtgtgtaagtgtgtgtacactgttcaatatggttcaatatggtaccaatagccacatgtgactatttaaattcattgcaatgaaataaaattaaaggtatactagctc

SEQ ID NO: 3154 - DNA, 17401 bp, Homo sapiens
tgctatgttacctaggctggtctcaaactcctggcctcaagtgatcctcccgccacacctggcccttactttaaagtttttaaacacaccgtcagtaaaacatttttaatagttgaaggagaaaaataaatgtttcctctaccatgattcggccaaatgcctgtcagggaaaaatccatctgactacatcttttcacgagtcattcctatatcttgccaacacatcatagaatataggtcagtgatgcttttccttttctttcatgagtgtgatttcatcgtctgtttcattcataggaggcaagtctcatatgctgactgaaacgatagactttctgtgctttgctttttaacatcagcttgggtttcttcccttacctaaccacgtccttccctatccccatcacctcctccctctctggcccagcaggtttcaccagcaacacaacagatgcagccaacccagacaatacagccaccccagcccacaggggggcgccggcgaagggtggtagacgaggatccggacgagaggcggcggaaatttctggaacggaaccgggcagctgccacccgctgcagacagaagaggaaggtctgggtgatgtcattggaaaagaaagcagaagaactcacccagacaaacatgcagcttcaggtgcagcccacggtgtctttccccgcgactcaaaggccctctgctccacgggcatttccggccctgacaggcacttgttgacctaagcagtgataccacacacttagtccacagaggagccgcagccccactcctcgagttttattaattccaggacaccctgcaaaacaaaattaaccattcagttttcaatcaatttgcccacaaagctctgagaaggggggacctaccccactaagttgtaggggtgggagaacaggctttaatccgacagagatccaaaccatggttcagcaattacttgctaggcttaactctctggctctcagtttcttcctctacagaatgggaataataactttatagagttgttacgttaggagcaataaacaaactaatgtctccaaagcagttgcccagtgcctggcccataacaaaccttcagctgaaaaggagcttttcattaattatattcactaggttgagggggttgccttggcttatacttgattatctctatttttgtttcatggaagaaagaaaggttgatggtcattatgtagctctgaaagaaaaggcatgttttcatctcatttgccaactcaccaagatttgaatcttgcttaatttttgctttttatgaatgtcttaactggggagattttataatgaggcccagaagtgtctgggagtgtctaagaggaaaggaaggaactctagtacccaggcttctccaatagactttatagattataatgatgcagttcagagcatttgttctaatgttaaaaatatgtgcactatttatcagcagaaaaaaaaaaaggcaagtaaatagacatgtatgcaacccacagtccagggatagcattaagagttgtggattatactccagtgcttccagaagctgagagaatggccaaagagagtggggcagggaggaaattaccctacatagtgagactgcattttaagagttcatggggtccgggcgcagtggcctacacctgtaatcccagcactctgggaggctgatcactttgggaggtggctggatcacttgaggtcaggagtttgagaccagcctggccaaggtgcagaaaccccgtctctactaaaaacacaaaaaaaaattgccaggtgtggtggtgcattcctgtagtcccagctactcaggaggctgaagcaggagaatggcttgaatgcaggagggagaggctgtagtgagccaagatcgcaccacggtactccagcctgggcaacagggtgagactgtctcaaaaaaataaataaaaagagttaatgactaggcattggtaggtcacttttatcttcttcccacacctagttctctgtgcatccttagaaaggaacagttagggtgccaaaccccaaagcctttgcatatccagtttcattaaatggagatggcttggggtttccagtgtacaaattgaaagtatataaggaaagcatgtgttgtatgagggcctgaatttcataatttatggatgttcatttttccccctaaatgtgtcattctttttgtgatagacatgatgagaaagaaactgggaaacatatagcagatgtgaggaaaataagataatgattcccccactaacttgtatgccgcgggaagattgggactgtctcttactactccctccgcccactatctatctatctgctgtttatagtgtagtgtctacactcagtaacttatttgttgaataaatgaatgggttcccctgtttatagtatagtgtctacactcagtaaccatttgttaaataaatgaatgaattcctcatagctggagtgtctaagaattggctgcttgaccacttggcaaggatgtgattgcagggagtcaagccaccagagaaatggctggactcaaccacctttaaagccacttgtagaatctgacaggcacagtagtatctgaaaaacttttaggtagaatgtggttaagcatttttcttttttgagacttgtctcaaaaaagacagacctcactccattgcccaggctggagggcagcttactgcaaccttgacctcctggactcaagtgttcctcccacctcagcctcccaaggtgcacaccgccatgcctggctaattttttttctctagagacaaggtcttattatcttgcccaggctggtctcaaactcccaggctcaagcaaccctcccacctcggcctacaaaagtgttgggattataggtgtgagccactatgcccagccaagcatttttaacattaataatcatattttaattttgatgtgtattgaaaaatataattagaagatcaaatctgcagtttcaaagatattagtaagaaggctaaatcattcaaaattgagttaatttgcacaaacatgttaagtaaataaaagttcttgtatatgtgaacctagtaaatattaccgcagtggttctgcaataactgaagtggggggaatcccaggaatttgccaccatctctgaggtctgcagaaggatgatgcaaacatgtaggttttctcaatcttggccctattgacttccgggcttgatcattctttgttgtgccctgtgcattgcaggctatttagcagcatccttggcctttacccactatatgtcaggagcacatcttccaactatgacaaccaaagagtctccagacattgccaaatgtcccctggtggtggttgggaagggaggttgggtggcaaagtcagccttagttgtaaaccactgcttagatgaaggagccaaaaatagccagctggcacatatcagctgccaaggctttaaatcagttttaactaaaatgagtctttgcagaattccttcagggtattgactgtgatcctaatgcatgcaaacatggaaggatcatagcagagagccaggaaagtaaagatgtccacagactttgaggccagaggtgttcgtgacttggcatatgcgtatttatgattgcttttacagaacatacaaggtaaatttacccttcgctagaccctaatgcactgattttttttcacatttctttagagccaaatggctaaggaaaaaaagaaactagaactctagctcccaaaaccagaaaaaaagatcctactgagttcatgtaacaggcaccaatatcttttggtagttaaaacagtacccaaaaaagggacagtctctgaacagactaaattgttgatattttccaaccactgctttgccttggagggacagaagccacaaccacccagtgttctctgtgaagctgagtgtcctgcatcaggccccgggatgctggagaggatgctgcagattccgctacctttgaatgaccctttccctctcactggacctttgtcaaaagaaaaaggtgtctctcttgaggctggaccagtgagccaaattttaagtaaacagaaatggaaggtgctaagcaaacaaactccagccaaatggaatatccaaggtctggatggccagctgccacttttgagttgttttccagcgtagaaccctctagttaggctgcagcatttcagattggaaaaaccagacctaagaaaacaaaatcaaactcccagacttcatttcctagtctcacaacacatctctgcccaagaggtcaaaaaaggtataggaattggggaaaatattagaaaccacctaatctgacattttgtggagaaagaaactgaggttagggaaatggggggtcttccctaatgtcacacaacaagtaggtggcagaatgaggactcagggaagtctcctgttgacctaacccacttctttgtgatcttctattttagaaactccgtaagccaaagaaatccatgttcttttttctgataccaagggactaagatcagctctaaattcatcgactgctgatgtggtactcagtagaacgtctgtgttcagtagaggatatggaaatcatctggtcacccatggaaataattgcttttcttttttagtgcaaagacacatggtctaagttgctgctgaaattttggacacatgagcccaggtctgggacttggcaagcgaataggccagatgggaactgttgcttgacaaattgaaagttctttgtttcagagtgaaccaaacctggtctcagctaatctaccaaaacaaaaaagctgggggagggtatattgtagagcccattttgataattatttttttggcacaaactactgcttacaccaaaaagcattgtggatttatcatataaataatgacatccccaaagctgaacactgcaaatgtagctattagggacttgttggagtgcttgctgaaagtatgtttttgtagtattgaatatctctgtggcgtgctgcttcatcccaaggcaaactatgggtttaaaaatagatcagtccaactggatcttacagtcgctaaacagctaactgctttagaggagcaaactcaaattcgtttagaaaaatgaaaaaatgaagagttgatttccaccagacaatcaatacatattattaataccttgtatttacaaaatacttttatattaagacctaaaactctgattataaccttcataggggaatacaaaatggtgattttcctcaatttataaagcaaggtaattcagagtaagaaaatgcctccagaaggcctggtttttatttccctactagacttccaggccacatttgatttcttgtatgcattttgaaacatttgctatctggttgttctcttccaaaatgaattcaaggtgattccacttacgttcccttgaaaagcgtttttacttaaaatatagtctagtatttgtgcatttcctacactaatcagtctttcactatggaatccttaagatgattatgcatgtgcacagcacacaattcattcttctttctctaggatagtgattcttgacctttcttaagccaaaggccccttatgaaatataatgaaggctccgtagatgctctctcagtaatatggacacataaatggacatagaaaattttgctctaaaatgaaactataaatgttgctttggaatctgccctactaagatttagaagcataagaggtgctagaactggctcccttatgaaagataagacctgaattataagcatatttgagcatattgaaagtagctaagtaatgaataaaagtcaagatggactctttcattggataattgggtaatttgctttctcaatagaaggtgacacagaattgcttgtagaataaaaaaaaattctttctggaaggaactttctggaagtagttcaaccatcgtgttttatacttggttggcatggcagcttgggaactcaaaccctattattctcaactctcaagtgagagttccttttcctactggatgctgccccatgaatttctatggcttatgtggttattaggcctttatttagtccttgcagcatcatagttatatgtatatggataaacaagaagctgattgcccttctctactgaggacattaattggtgttcattttcccacaataacatggctaaataagtattaacatgttacattaagaaatatgtcctgccaggcacagtggctcatgcctgtaatcccagcacttggggaggctgaggctggagaatcacttgaggccaggagttcaagagcagcctgggcaaaatagctacaccccatctttgcaaaacattttttaaaattaggtgggcattgtggcacatgtctctagtccctgctactcagaaggctgaggtgggaggattgcttgagcccaggaggtagaggctgcagtgaactatgatggtgccactgtagtccagcctggacgacatagcaagaccctgtctctataacaataaaaaagaaaaaaagaatatgttcatattcacatatatctttaaatgatggtcagttgtctcaatattctcagggttctgcatttttacagatcctcacaacactcaggcctttggtctctgtacttacaacatattgctttattaataaagtgttttgctgttcatagactaaatgccaccaaagtcatatactttgtatggggttttggtgataggccagggcaccacatgtgctgactagtgctctttttatagtaaaacagacttatgaaagcaaaaatttattgtgaaactgtttggggcatgccaaatatcataggcagttagctctttgctaactgtagaaacccagagaatagaattgagtgttttcttagggaaggggcaatgaacactttgtgcctgggagatcgaatgctgccaagaaagggtttcattgcccaggacatagtgggggaagaaatggagactaaattcaacctctccaagatggccacaggcaggggtgttttttcttccaaaagtataagaaagcaagagaacccagttttgtttttaatacttttcttgtttgttttctaggtagaaaagtgtggattcactagaaattagaacttgattccattttctaagatccattgtctacattatctgcagctgagagcttctactcagggggcaaggtgtctagcagtttcgatttcagaaaagtgttatttctgtagtctaaatgcaaataatatgacatttccttctgaagcaaatatatacgcacacacacacacacacacacacacacacataaacacatctctgtttcctttcttggtttttgtttggttgtttttttttaaccagagattgccttcatttgatggtctagaagtgactttcttttatatgtgctattttgagcagaaggagaactgagaaaaagaaggaaggccatctgaatttagataggtgtaaagtcaaagaggaagaagttagtgtttaaggctaaaataaattgtcctgtaagttatcccactgaccttggaattgacagggtcacttttggtttccacagagccccttatcaatcacattcatttggagttgggaggtacaatttgccttcttgtatgttctgagatgtaagagcaattttcttgtttgattaagtgatttattcatcattaaggctaatttcccaaatagtcatttttattttgtaaaaataaagtttggaagagaaagggaatgagatgagatttgtagatgagatttttattattttgtcattgttttattttattatttttgttattaatgttactcaatatgtggttgcttataatttatttcaccaagaaatttagaaatgggagatattccttaaaacagatttcaattttttttagcgcaacttctagaatcccaaacatactttcctaggtgataaatacatggctgaaaagccaagttcatattgaaagtgtaggtacaacttaatgacagcaatgttaatcgtccttttcggtgtgcatgcattttttaagtctcctacatgtgaggtataatgcctggcagccacaaataaaccttgaccaaagagaggatattattgatcacaatttttaagtggcttattcaagatagtgctacatttacgttcacttttatcaagtggaagcatctcggagctaccatctattttatgtttatatttgtagacaatgggtgccaagttcattattctacaaagctatgagcatgcctttgtgaattaatattaacagataaagtagagatccgaggcacttacatgagtaaataagaagaaaaccccacaccatccacaatatcctgatattgaggggggaaagagtattttatagaccgaaattgaccaaataatcaatgaactcaatcaaattaattcaatcatggcccaaaacttcattgcctccttgccaccctgagctgacatcatccacctgcagctgaccaacatgtgtactgtatgcttccatacctcctgctcagtgggcatcaggcaggtagatgtgctctgctcaacagtatcccatgaacagtaattgagtaggagatggtggggagagcagggattcatgactgaaggtcaatttattttcagatattctttttagattgagcaacacagacttcttttggaaaatctgatggtagatgagtcagcttattctgattgcatttcaggtggaagccacaaatcctaccacataattctgcccaatgtgcgcctcatattcacattctcaattggatgtaaacctgagcttgtgaaggttacaatagttaaatgtattaagtccttattatgtgctgggtattgttctgtttcccatctattactgtatttaatcctcatagtaacacaaataatgtactcttcttatccccatcttataacgaggttgctggagctcagctgggttatgtaatctacctagggtcacacagtcagtgtggagtaaggattctcacctggcttcggttcccatcacctaagggtgtggtctagccttttaataaggttcagctcttgagttaaaacctaagctctgcagaaagcccctgggaaatgtgagggccaaattaaaggtaagctacaaactttcaggtgaaccacattaaataatattcttaatgtcatttagacataatggaagagtttgccagttttgttgttgaaagtgcacagggctgtgggtttgtatcctctggtcttctcaacatggttttaatacatatctcttttagaatgaagtgtctatgttgaaaaatgaggtggcccagctgaaacagttgttgttaacacataaagactgcccaataacagccatgcagaaagaatcacaaggatatctaagtccagagagtagccctcctgctagtcctgtcccagcttgctcccagcaacaagtcatccagcataataccatcactacttcctcatcggtcagcgaggtggtaggaagctccaccctcagccagctcaccactcacagaacagacctgaatccgattctttaaaatgcaccatcagacctggcctccaagaagagctgtagcgtaccatgcgtcctttcttttaagggcatttttagaattaactcagacctggaagactcctcagttcttcaaagactggctttcatttttatagttattatggaaatgttgtcttttatacttagttatataagaaaaaagggagttatgcaattaatatctatcagcttgggaaacgctttggtgcttttctccagttttctggtaccagttacttgtttataaactgaaccttttctgtatatagccatggtttcattcttatcagtccaaccctttgcctgaaacattgaatcttgttaaaccacagcttttagctaaaatgaggtatacctagatgtcaagtaagacagatccaaggtaactgggtaggaaatcttttgacatcttaactcatgttgagtttgtgctgtggtgtcaccagaattccagataaacacacagcctttcccatacctttttttttcttactataaaatattataagatccattgatgtccaaataataccaccaagcatctcttcacctctcctcctcttggtccacttgctaatgcccagttttcttctccatttccactttttcttaggctccctatttactattcattttgacttccttctgttttatttttttccctttagcattgcatgtgaataagaaaataatgtttaaagaaaaaaaaaaaaaagcaaacctccaaaacgtggacctaaccattgcttcacttacacttcacccacagctggagttcattcaactcttgcttttcacaaaatagtaaccaggagatgtttaatgtgcctgatttaatgtttttaataatcacagcaaatgaaaggtggtttagttataagtgaagcatggttgaataccagctggggagacactagggaagggagctttgtaagccttgattgcgaaagtccaaattttgatgtggggctataacatgacacccttggattgcgactggttttatacggcctgcctataacgttgaaaatccatgtactacataataattcagaagggctctattcactacacagattacattgttcaatcatcagctgctaatagcctaagatttatttttttttttttcttaagcctatggaaccggctttgctgttctggggggtgaaaatagactaactactggagaaacaaagagagaaagaaaacccagtgtttccataggggcacttttagccttcccacaacagttaagcactctttgactgctgaaggaaccccatggatgaggtgcaggctacttcactctttttttttcttttttgagacagagtctcacctattgcccagactgaagtgcagtggtgcgatcatggatcactgcagcagcatcctccgagttcaagctatccttccacctccgcctcctgagtagctgggaccacaggttcacataaccatgcctggctaatttatttttacttttattttaaaataaaagatgaggtctgtcttatgttgcccaggctggtctcaaactatcctacttcttcctcccaaagtgttgggattataggtgtgagccactgcacccagcctacttcactcttctgaattattctgatttattttcaacaacttttgtgaacttgcccgtgatacaaagcagatagtccctgaaccacagtcgtgcctccttgaaacaagccattctactgtgctaatgttttaatatcacatctcacaaataacaggggtgaatgtttctctctagcaatctaggcaggtgctggtgtttcatctccatttgaatgcttgacctcttaatgtgtgtgtgtgtgtgtgtgtgtgtgtgtgtgttcatgggttttaaaagaacagtattttacaaaaggtgtagcttttataagagtgcagaaaagggaaggatgtgtttttttctctcactatagtataagaatctattttggagaaaaaaagaaaatatgagggtctcgaagcatgatttttatataactagtttcagttttatctaataacttactttttaaatcaatatttatcaacaatctttccttgtatgcagtgctttcaaaagatggttttgagtgtccagtgaaacttatgacttggatatatggttgaagaatcaaaacaaaagcaaaaaaaaaaagcaaaaaaagaaaagagaaaaaaagaaaaaatgcaaatggaataattttctattatattttagacaaacatatcattttcgagtattttaaatactgaattcatagttgttgttttttaaattccaacagtaacagctgaatggtttaatctgactggcttcctaagaaatgtttaagactcagctttaaaaagaagttaacattcatatctctgttttgaaatcaaaaatcatatttcaaaattctttcctaggaccatctatgtgtctcccctcccctccacaaaaaggagaaagagtgcattaaaatgtttagttgggttttttaatttttaatttttatgttatgttttgctttgttttaagtaaacaaaaatttttctttctttactgcatgcatagcacttaataaaatggatttttaaaaaatccactagtaatatcagaatgtccagggagtgactgtcactacaatgatggtttagtttacttctgttccaccttttgattgaaatatttagttgttaggctgaaagcctcggcagttaagaacttgcctgagttttcttcgttcagcaacttgacagtttgactgatgtgcattatatatagctcaattatgtctgttttttatgctaagtaggaaaaccaaccacacacattagcaaaccggcctcaacatataattagaataaactgtcttcttgttctactcagggcctttaggtgtgttcattcacggtatggaaatacagtaaatgaaagattccaactagttgtcagtgcttcttgaaattccaaacagaaagatacattggtcaaatccaacacttggcttatcaatattaagtcttttacctaaaggcccagccgtcaccagacaacagaataatcaatctgcctgaaaatccctcctccttgtcctacactttttgcctgtttgggagaatatctttgtactccattctcctccctcagccagttactgggtcacccatccatgtgttcatgaatcaatcatcacggcctgcagagcacctgtcctaaggagggaaaatcctgtcacactgcctctccccattcgtgtgtggttttcttgatcggtgagatctgtctctgaagtcactgccagcctccctgggaacgtctatagtgcctcccctgccttatgtgatgggagttaacaactcagataagtacacctgagagcatttctatcaggtaaactgtcacttaaatggaggtgtccacatcttaattgtttctccttgacacatttctcaatccacgaagccaggagaggtagagtgaaaatcccagccatggatgaatgtactaatttgaaagccaagtgttaagtcggatgttttcccgttacactactactcagccctctcctgcggccacatcaacggatgcaagtcacagtcttaacacagcctgtgggagacaagcagtttgtgtgctcacagtatatattatagtaattagggtgacttagagcaaatactcttcagatcctatgtagtcagtgaaacaaaatggagagcgtattctgatagaaggacgtcgacggtgaatgttctggtggttgttgcctgttaagtaaactttagtgtgtaagttgagtttgtcattaaaatcataaaccagctgcggtaacagacaagcctttggctggggagttttaagcctcggtaactgctataaaactagccatccagttaggatagaatgtgtttctttctggttaaaaaaaggaaaaaccatctaagaaaatatatatgtatgtatgtgtgtatacagtggaattcaaaggaccaaagcaaaatttgaacaggaatctattaatttagaattttataagatatttattaataaatgttatttttaaacattccatttgaacagtattctgtaggatctacttgtttttaaagtgttagtccataataaactactatagttatgtgtattttcatttttcagggtttcaaatggctattctccatcatttggtggaaatgtttgcttagatctctgtgcatagacatttcaaggatttttattgctctgtgagttattttttaatcaacattctgaacagttttttttaaacatttatttctgtgtgttcatttttaaagtaagctctttcatttaggaagcagagttcagctaaagggaatcagtaactctaactggaacagctttcttgtagaagtgtaaaaacagcttcatctctgcctctctccaccccaccccaatttcctagaaagccttgcactattcagctcccttagtgctttttgtcccttcccgaacaatatgcagtagctttaagccattcaagctccattatgcagtatatctgagaagggaaaggaaacaacccatttaaatttgaataaaaccgtgcctatgcgaacagtagcaatttagaatctcttttctgcttttaaaataatttatatttaaaaattgcactttagctttttgatccctttgtatttctcttattctctttctaacctcttctctgtcctcaaacttgcctttgctctcctttacaataccccccacccctcctccaaggctctgagcggcatcatttaaaatactttacagatatttgcaccaggtacatttatgtgcgtccattggtagcacagctgagacctgtgtctcacatcagcctaggtgaagcctactacaagaatgccaaggagaagagccagtacactatatggtttatactctttatccctttattcatagcatgttttttaaaaatgttatattatgcaacagatgtgaggcagcagctaagctatacttaagaattttctctcaccttccaaaccaaagtgtcctgaataagccaggagacttattcttttgtgcaccctggtgcacatctgactgttgtcctagccatagactctctgaggccactgaaagaacagtggccctatcgatttcattcctaggtctcaaaaatacaatgttgccttgtaacataattagggacagcacctctatttcacaattataatctaaggtaggataagacgacacagcagcaataaacttacaagtaaaattcaataccaaaacaaacacaaagaaatttaaaaaacaaaaaacctagctcatcatgttgtgaaaatgaaaaagtgaatgtccattcaaaatattttactatttcttgtggagtttttcagtgatgtaatgcttgtagccaaattgcttaaagagtgtttatatatttttttccttataaattgtctattttttaaaaaagctatttaaccacagctgaagtggggggtaaggccaaattgccaacacttgttaaaagattaatactcttaagtggcactctgatacctttccaacttgtcatcagaaaggaatcaataattaccaactgttgtatttagaccaacttacaatatctagctcattagaagccaggatctagaaagctccttctaagccatttaagatattcttacattgagcttcatattatagaactttataggattggatattttacaatagaataatttagcctcaggactgagaatgtggaagctgaataaattagctttaaatacatcattaaaatcttatgcacaataagctcattagattctagttttctcctttagaataccaatgccacagacactacaggagataatgaaaggtatcagttgtgttgagtggagggagtttaagagaaaggacccttcccaaccagcagccagtagaaaatacaacctactcacctttttcccttctaagttctgctaaatcacatctgcctcatagagaaaggaatgttgcctttgagaactgtcttggagaacagataagcttgaaatgttctctctagagaggacatagggtttgggatcctctgaaaaggcccagaaaaatagctcagttcaaatacaatgttctaggacaattggaatataaatattgtccaaaaatataattaaaagaaaaaagtttagcactgtgtaaagtaagtgttaactgaggaagtcccaaaaaggtgctgtcactttaagttctggacttggggttctttgtatttgtaaacagcaaagcatttgtgtttgtttgtctatttgtaaagcaaccaccttccttattggaaggagaaaaaaaggggtacatacatgtaaatacttgctgcagcatttaatatgtttaattttgtgttaagctttttgttgcatcgtgaacacatttattgttaccaatggacaatgagttcattaagactgttcaactaggtcagatttttacatctctttctagcaagaagagacaagattttgtgcatttgtacaaatgttaatatcactgcaattccaatataataaagcactcaaatgcaaataatatatgtcacctttgtatgatgaaatttggggttgggggtaatgacatctattcctcacatagtcttgtcagaggcatgtgaaccagagcaactccatcttgaataggagctgggtaaaataaggctgagacctactgggctgcattcccagaaggttaaggcattctaagtcagtggatgagataggttggcccaagatacaggtcataaagacctttctgataaaacggtttgcagtaatgaagccagctaaatcccaccaaaaccaagatggtgacaagagtgacctctggtcgtcctcactgctacactcccaccagcgccatgacagtttacgaatgccatggcaacgacaggaagttaccctatatggtctaaaaaggggaggcatgaataatccaccccttgtttagcatatcatcaagaaataaccacaaaaacgggcaaccagcagccctcggggctgctctgtctatggagtagccattctttctttcctttactttcttaataaacttgctttcactttacggatttgccctgaattctttcttgcaggagctcaagaacccactcttggggtctggaccgggacccctttccgataacagtctcattcatgacttataaaccaaggcttaccttttcagggtcaccattatctagggacaaaaggagatcagattttctccttcccagaccagcactacattcccactgcctcttccatccaacttcccaactgaggtcactaatccagcatattcacagtgggttggccatacaacttaatttcactttaagtgagtttggaattagcagattttaacagtcaagaaataaaggcagcctaaggtcatgttccagccgtgtctaggaaccaagaatcacgtgctggcttctcggacaatcaaatcctggggttctttgcttgatctccagaggagtcccaagggtagtcttagtccttttatgtgttcctttagatattgcccttcctttcttcctcctcttgcttttatttctttttctttttttagtcattctccttttcctctaacactcgatatctgatccatcagcaagatcagaatccaaccatcatgtagcaccaatcttaaagttatgccctgaccaagccatcaacatctcccacctggattattacaataatcttctaactggcaaccagagggag

SEQ ID NO: 3155 - DNA, 4818 bp, Homo sapiens
atcatctcctcttttgacattcatattgacatttaaattaatgttaaagtcagatgcagtggctcactcctgtaatcccagcactttgggaggccgagactggaggattgcttgagcccaggagttgaagaccagcctgggcaccgtagggagactccatctctacaaaaaataaaataattatctgggcatggtggtgagcacctgtggttctagctactcaggaggctgaggtgggaggattgcttgagcctaggaggtcaaggctgcagtgaaccataattgcaccactgcaatcctgagcaacacggtgagaccctgtcttagtaaatgaatgaatcaatgaatgactagataaatagataaataaattaataaataaatgttaagatcctatttgtgatagtggaaaattctcattttttttctaactttaatgggagtgtctttagtactccatcattaaggatacaaatatccgctagtgtctgttaaaattaagttttataactacactatcccatattatgtcccactatgaacatgtatatattttaaaaagtacagcatgtgtttagaaacagagatagatatgattaacaaacatacacaaatatatggggttaacagagatattggatatttatttttatgaagatacatgccacacttttatattgcagacttatgtacacgtgtattggtaaattgtttttaataggggattaagaccatagaataaaatggtactccttcatccagccatcatttatccatctctgcatcatccctctatctatccagttgataaatatctcccatttacctaataagtgttgagcactgagctaggttatcagaaacaaacacctcctaaaactttttaacttctggaaggctaaaatgtgcgtaattttgtctttcatagcaaatttccttttttatggacctacttcagcattcatacacaggcactttttttcttcaccaaagcattgagggcaatttctcaaatagtaacaaataaataggaaacttaaatcttagcagttgacactgcataatttttcccggattttcatcaaattttaaccatgtaattttatttacctataattcaagagattcattgtctttttaataggaaaaaatctgtcagtcagggaaattcataatgtccatagagagacgttaaatttgtcattgtaaagacaaaattaactatatattaatctatcatctgtttccctagctcaatctaatttgacatatttaatgaaaatcactgatggcttctagtataataaactgatctttaaaacaaaacatagaaattctaatactcacatatttcacattgaaagagtgatgaaaacttcacttgaaacatttattttgtgatttcaaaaactgtagttaaaatgatagctagggagcagtaaatcaccatatgctacgctacttctaggcttggactcagaaccttgaacgttgacagaattaacatattaatttgagttttccctggatgtttcagtttaacttttgatattcttctttccaaaggctgaaaaaaaaagcctttcatttaaaatgcatttcttagagaactgttaatgatctcccttcctttcatttagcaggcaaaataacatttctttgaaaaatggttatctgctgagaatttgattattgaataaagatcagtaattttggggtgtgtggaacatctgtcaggaattttggaaaggaatcactgactccattcatgtgacttatttcatatgaaagcagcatacacattatatcagagaggacagctaaagctatatcaacacagtgccgtaaattcagagggaagaactggagaacttgtggtagcatccatccagcatgacatcattctttgctccctccactctttgcaagaagccctttctcatgaccatccataatgtgcggtagtgatcgtattatttctttcttcactaatcttcggcaacttttcaaggcctatgagataaaatccagatgcctagagttagcatttaaagccctgtgctgtggcctaactcatgtctccaatctcagctcctgctacttatgcaccttctctaaactttcttctggcagctgcaaactcttacctcaccctgggcatgtccacacgttattctgcctccaagcccttgcttcctctgcctcgaattcccttctcagattttccatgtcacttgcccagatcgactgtaaaacatttcctgatccttccacctagatgtgatcaactacatgtacttacttttatatattttcatatacacaacagagcttatgttgcacatgttattttattcttcactctttccacttaatgatatgtctgaaagatcttgagatatcaactgagaacatatatctcctcttcatttttgtatttaaatgtttttattgaataatttagaagagtaaacaaagaatgtccttccttctttctctgtaattcaagataaagccaaaaaccttagagaaaatttgaaggggctgagaatagggctatactgtcacttggtttttgaatagcctgcttcatatttttaacagccacattttatcacatcatatgggcgcacactataatttaattcatcaactaaatattttagttgtccctagtttttttttaatctgttaaaacaatgctgtttgtaatagaaaacactcttacacatttatattggagaactttggcaagggttatcagtaggattaattactagcaatgaggatattttcaatcttgaattataggtatttataatggtgtctttacaccaccaccctctgctccaaagacctgtgagcttcttgaaggtagaacgaattattattaccatcatcatcgctagtgtgtattggtcaggctctatgctaactgtcttacaagtgtttctcatttagttctcataacaaccccttggactttggattattttcatttcacagttgatgtgcagtttatgaggctgcatttgaacttcctcctaactgctgtgacctcttgcactcggctggccttctggagatatttattgagtgattatgtctggaacagaacaaaacttgcacagaaaacaaaacaatcattgttcatatttttaaaaaggcttttctttcttcatccacaaattgtctttgcaattctgttggttattttgcttgaggacatttatcttctggaagaaatcactggggaaaaaatcagttttatgtttaataccaatggttccactaatatgcccctgaattaacagttatgtgcaagtttttaatacattctcaccatatttctttgatagagaaaaaaacagggagaaaaggagttgtgtaggggcttttcataattttttaaaaaagtttaaataaatcatttatttttcaaatatgtattgagcatgtattgtatgacaggtgctgtgcttccagctggaggaacaagataagagtagaaacaccttaattagccaagcatggtgactattagccaagcatggtggtgtgaacctgtagtctcatctacttgggaagttaaggtgggaggatcgcttgagcccaagaggttgaggctgcagtgagctgtgatcacagcactgcagttctgcctgagcaacagagttagagcctgtctcataaaataaaataataaaggcctaaataaacatgcaggtgtatagggtgattgtgagtactctgcaaggatgatactggagagtcaggaaagtcacatgaaagctgcaatgtgatgttcaagaagagcagaagtctggtgtgagccggagcctggcatatctcaggagccagaggaaggagcatgagggtgagaagcagaaagcatgagaagagtgattcgaggagcagctgctatttggccctggtggtaaatgatctttttaacataatatctttattcagatgtaattcacatgctatacagttcatccatttaaagtgtataattcatcggtttttagtatattcagagttgtacaaccatcatctttatcaattacaatattttcatcacccccaaaagaaacccagtatctgtcactttcattttcccctactcatgcccccatcttctcaaaaccacaaatctactttctgtctctacagatttgcctattttgaacatttcatataaatagtatcatacaatacatgacttttgtgtctggcttatttctcttagcataatgtttccaaggtcctccatctatcaaatcttcactcctttttattgctgaatacttactgaattttattgccaaatacattttggtaatattttatgtttgttgttatattgtgatttcataagcttctaaaaatacctcacagactttaagtactgaaacgagctcacctttaaaacagtagaaatgtgaaattaagtcctgattattaattgttattcttaaaacatttaaatatcatgctatggaattattataaatgttcaaatgtgacttctaaaatagaataacatgtagtttcttttttgaagaaattatttcagcattttgcaatgcttaatttttgcaacattatcagagcatgaaaacataacacattttataacttcaattatagaagaaacgagttgacatagatttgttctactttcccaataatggatataaattggttttagtgatggtatgtagggaatatttttgtggcaaatatttgtacctgtttttatagaaaggaatatgtgaggcaagttactttctattaaatatttttaattgtttt

SEQ ID NO: 3156 - DNA, 4477 bp, Homo sapiens
gttttatcccatgcggtttctccatagtgagtgtgttctcatgagatatgacagtttaaaagtgtgtggcagttcccccatcttgctctctctcccgtcaccagttatacacaagatgaatggattaaccactggaagacctgcactactacaaatgttaaagaaagtccttccaagaaagaaaaaaggcaacttaatggaaacttgtgtctaccaaatggaaagaagagcaatgggaatcctaactacggtacactgaagaacacttttgcagctgactaacaactcttgatattgagaaagttatcagaattatttgcaaatctcctctcagatttgcaaaggatgctggcatttctccatgaggcaggagtgtgagaaaaaaagttgaatgtggtgatggggaaaacactgaagttcaaaagaagcgaagacaagaagctactcatggcagcagcttttcccataaatcaagaaatgctacagattataaatgagatgagactatcaagaagagacctaataggagtgtgaagaccaaaaatttaaaagacgtggttatatactttgagtaaactctatatataggacaatgttattgtttggttctgtgttcctcactcaaatctcacctcaaattataatccccatgtgtcaagggcaggaccaggtggaagtaactggatcatgggggaagttttcctcatgcttttctcatagtaagtgagttctcataagatctgatttttttataagcatatggcatttcccctcctagcattttgcctcctgctgccttgcaaagacggcagttgcttcccctttgccttccgccatgactgtaagttccctgagtcctctccagccatgtggaactgtgggttaattaaatctctttccttataaattacccagtcttgggcagttctttatagcagtgtgaaactggactaaaatagaaaattggtaccaggagagtgaggcactgctgtaaagacatcactataaaggcacctgaaaatggaagcaactttggaactagctaatgggcagaggttggaaccatttgcagggttcagaagaagacatgaagatgtgggaaagtttggaaattcctggagacttgttgaatgctttgacgaaaatgctgatactgatatggacaataaatttcaggctgagatgctctcagatacaaataaagaacttgttgggaactggaataaaggtgactatttgctatatatgctttagcaaagagactggtggcattttgcctctgtcctagagatctgtggagctttgaacatgagaaagatgatttagaatatctggtggaagaaatttatatgcagcaaagtgttcaagaagtgactcgggtgctcttaaaaccattcagttgtatgcattcacaaagatatggtttggaattggaacttatgtttaaaagggaagcagagaataagagttcagaaaatttgcagcctgatgatgcaatagaaaagaaaaatctcattttctggggagaaattcaagcctgctgcagaaatttgcgtaagtaacaaggagacaaatgttagtcaccaagacaatggagaatatggcctcagtcaatgtcggatgtcttcactgcaagccctccaatcacaggcctgaaggattggagagaaaaaataattttgtgggcaaggcccagggacttgctgctttgtgcagtctctgaacttggtgccctgcatcccagctgtgtctaatagtggccaacatacagctcaggccattgctttagagggtgaaagccccaagccatggtgtcttacatgtggttttgggcctgcagatgcacagatgtcaagaattgaggtttgagaacctccacctagatttcagaggatgtatggaaactcttggatgtccaggcagaagagtactacaggggcagagctctccatggagaacatctgctagggcagtgcagagtccccactggggcgctgactagtggagctgtgagaagaaggccaccaacctccagaccccagaatggtagatccaccaacatcttgcatcgtacacctagaaaagtcacagacgctcaacaacacctcatgaaagtagccaggagaggcgctgtatcctgcaaagccacagaggcagagctgcccaaggctgtggtatcccacctcctacatcagtgtgattggatgtgagacatgtagtcaaatgaggtcattttggaacttttaagacttaatgactgctttattgtattttggacttgcatgaggcttgtagcccctttgttttagccagtttatctcatttggaatgggactatttatccaaagcctgtaccccattgtatctaggaagtaactgacttgctttggattttacaagctcataggcagaagggacttcccttgtctcagatgagactttggactgtggccttttgagttaatgttaaaatgagttaagactttgaggaactgttggggaggcatgattagttttgaaatgtaaaaagacatgagatttgggaggggccaaggacagaataatacggtttggctctgtgtccccttccaaatttcacctttaattgtaatcgccataacccccacatgtcaatggtggaaacaggtagaggtaattggatcgtggaggcagtttcttctatgctgttattcatgatagcgaatgagttttcatgagatctgatggttttataagcatctggcatttcttctgcttgcacttctcattcctgccaccttgtgaagaaggtgcttttcttcccatttgcgttcaaccattattataagtttccagaggcaaacccagccacacagaagtgtgagtcaattaaacctcttttttaataaattaccactctcaaacagttctttatggcagtatgaagacagactaacacagaaagatatagctgttttggaaacatcagaagtacagttgtagcaataaataaaatatgaatagattaactttcgtacacctatttgtgttgaaagcaccaggagtcatagccaacaatcactttaatatttctccagctaattcttctgatttatttttatgtttggttagccagtgacttccccactagctaaaaaatatttttaaaagtatgtatgtgttaatatatcttgactactttttaattttccaattaaaaaataaatcacactttaatctctgtgtcttgatttttctcatttaagaagagctcattgacttaggggctacatactatatgacaagttacataaatcacaattttcttaaatatttccctattgatggttactcagttttattttttttatttttgccattagtaacagtgaagaaattaatgatcttgcatttaaattttaagtacaggtgattggcttctttttacaacattaaagagttgtaattgacatacaataaactgtaattatatagtaggcagcttgctaagtattgacatatgtatttacacatcaaaacattaccactattaagatagtcaaacatccattatctctaaaagttttcacatgttactctgtaattattcctgtctgaccctcccactgtccaaaggtaatcaataacctgctttctgtccctaaaactcagtttgctatttctagaattttctataaccaggataaattttttaaagatcttatttttttcactcaatagttattttgggtgcatacatattttttaggatatcaatagtttgtttttattgctaaggtattattttatttatgaatatcccacaatttatttatttatccaaatgttgatggacatttggttgttttgagtttgaaactattataaataaagctgctataatcattggttttctattctttgtataacatatattgttgtggttgaggggtgcagatatctagaaatgaaatagctcgattgatggtaagtatatatttaatattttaaggttctgttaaactgttttccaaagtatttgcgttatttttcattcccactaacagtgcctgaggattccagtttttctacgtgcttacaaacactcgatgtggtcagtgtttttaagtttagcctctctgataggagagtggctttaatttgcatttcactcttaactattgatgtcaagcagatttctgtgtgccgatttgccatctgtatgtctttggagaagtgtctgttaactattttaccatttaataaaaactatgttgctttcttattactaagatttggcagttatttatatattctggatccaagatctttatgagatatatgatatacaaatatgttctccaaggctatgatttgccttttatttacgtaatagtgccttgtgaatatcagaagtcacttttgatgaagtctagtttaccaattttgtacactctgagaatttcaatgttttgctttcattttgcttcaatcctag

SEQ ID NO: 3157 - DNA, 9977 bp, Homo sapiens
tctagaaagcagccacggccaagagtccagaggttccaaccaggaaataccatgtcagggaagtgatgccacggatctttctatgaggacaggaacgtgacccattgtcaccccatggcagcctccatgggctgaggcactgagtgtcccacagtgggcccggctccaggttagatgagccatgactaggagcaaggcgccccctagaggggccacacaacagaggagctactggagtgaggtgcttccctccaaggaagagccagtgaacacagtttattccgaagtgcagtttgctgataagatggggaaagccagcacacaggacagtaaacctcctgggacttcaagctatgaaattgtgatctaggctgctgggctgaattctccctctggaaactgagttacaaccaccaatactggcaggttccctggatccagatcttctctgcccaactcttactgggagattgcaaactgccacatctcagcctgtaagcaaagcaggaaaccttctgctgggcatagcttgtgcctaaatggacaaatggatgcatacccttcctgaaatgactcccttctgaatgaatgacaaagcaggttacctagtatagttttcccaaacttcttcccatcatagcacatgtagaaaataatatttttatggcacactgggataaacaagcaagattgctcacttctggaagctgcatatgactagaggcctcttgtgactggaggtaacaaccctgcccagtaactgtgggagaaggggatcaatattttgcacacctgtaataggccatggcacaccagccaagatgctctgctcacagtcagtatgtgtgaagatccctggtgcgtggccttcaccacgcatcttgagcaaattaggaaaatgtacccttcgcttgaggcagatgcagcccttcccccgagtgcatggcttggagagcagaatgtgggctgcatataagcacactcatccctttgtctgggaatctttgtgcagggcataacaggcttagtaagtccaaacacagatgacagtgctgtgtgggtctctgtcagagttgtggctctcagccatgtagacacactctccaaatggagtgttggaaaatgttctttctgcagggtctagagactgctgggacacttttcttggagtgctacttcagaagccttataggattttctttctggccaagatttccttctgtatcactccaagcagcctcagcagaagaagcagccatgcccagtattcccactctccaaaaggaactgaccagcttatatttctcacacttctggggaactgggtataatccaaccatcaaaatagaagaccttgcaagaagcagagtcattctccagaaggaacttgggagatgatggtgcagatgatgaaactgggttcatcccagttccaaagactcagagaactagagtttaagctgaggcagagtgccgccaccctggcatgccccacaaacagatcaccagccagcttacacaggcattaactctcctcaatgaggaagaatcattcacaactgagcaagacattcatatgatcatttaaggaagtgtttcccttatgtgttagcaagtataatcggctaactcctaaatcccaatgaatagtcctaggctggacagcaatgggctgcaattaggcagataaagacatcagtcccagtaaatgaatccatagactcatctagcaccaactaccattagcactatgttaggagctgcaaggccccaaagtagaagatgtgcataatgtctgctcttgtgtagctcaggagacaattccagcacagacactacagttaacgctgaactgcagctgcaagtaatagcatgaacagtcagaaaaataccttatgagggggcagggctgaagctgggccttgaaggatggatgaaatttggatagagaatgaggaagacagagggcctccaagtgagagaagcatgaaaaatgagcaggggcctggatcagtggggtgtattcagagcacctctccagatgcaccatgcatgctcacagtcccttgcctatgtgtggcagagtgtcccagccagatgtgtgccctcaccccatgtccatttacatgtccttcaatgcccacctcaaaaggtacctcttctgtaaagctttccctggtatcaggaatcaaaattaatcagggatcttttcacactgctgttttttcctctttggtccttctatcactaaaactcatctcattcagccttacagcataactaattatttgttttcctcactacattgtacatgtgggaattacagataaacggaagccggctggggtggtggctcacgcctgtaatcccaacactttgggaggccaaggcaggcggatcacctgaggtcaggagttcgagattagtctggccaacatggtgaaaccccatctctactaaaaatacgaaattagccaggtgtggtggcacacatctgtagtcccagctactctggaggctgagacaggagaatcgcttgaacccaggaagtggaggttgcagtgagctgagatcacaccactgcactccagcctgggagagacagagtgagactccatctcgaaaaaaaaaaaaagatagaagccaataagcatggtgcaatcaaattctggcaagcattaaatatcaggatgcagctgggcacggtggctcacgcctgtaatcccagcactttgggaggccaaggtgggcggatcacttgaggtcaggaatttgagaggatcctggccagcatggcaaaaccccatctgtacttaaaatacaaaaaaattagctgggcgtggtggtgcacacctgtaatcccagctacttgggaggctgaggtgggagaattgcttgaacctgggaggtggaggttgcagtgagctgagatcctgccactgcactccaggctgggcaacagagtgagaccatgtctcaaaaaataaaaataaaataaaataatatcaggatgcatacatcagaggctgttcctagtgtaaaggcactttggagggagaagactttcagagttaggcagaccaactaagaggtcagctgaagcacctaaccagttgtaaggaggtgaaagacagcaccccaagaagagacgtgcaggaaggaggaaagaggcttggtcataaaggatggaggaattccaaagtgacactgaacaggctgcgtttatcctaaaataaaaccactcctcactctgtggatgcgttgaagactcattcccaaacatctttattctctaacttgccctcttcctcttcctaatatgctcactcaagtaaaattactagtgtcctaatgcccctatgcatattgtcaaaaataaaaatcagaagcaggttagatctgttaggtcttccagaagagcaaacctgggatgaagccagagcccaggaattctgaaggtagcctttggactcaggacaccctactcttgtctctcctctcagtttctctgctatgaatctcctgattcatgaacacgttatctgttcacccttctctctaggtcttagttcttagattttccttctgtaaaatgcatgtgatcttattttcccctccacaactttccagatgaactagactgtgaccaagaggtctataaaatcaaagcatcatggaacaggatcttgtatcagaccaaagtgtgccagtttttaaaaatgtgcatcaaaatggaagtctcagagacagagccctctggtggaaagttctagtaggttaggacagtcctgcctgcagacaccttgggctttactgagggactcaactgagaaaatgaggaatgttgcagctcatgattcttagaagaagaaagtgaagcttgtttaaaatatgatttaaaaaatctgtagaacactgtaaactacacaggctatgagggaatagcctggttgggccagcttggaaatcgggcacaggcaggaaggggcctgtctggtttgggccgtgtccacagagagcacttcttaggtcctgcctggagagaaggaatggctgggctatattttcttccagactcattatttttcttctgtttgacttttctctgaatttcccttgatttgtataaattttctcaataattagtgacagtgtctactgattgtaaaatgaagcttgaaggccaggcgcagtggctcatgcctgtaatcctagaattttgggaggccaaggtgggtggatcacaaggagttcgagaccagcctggccaaggttgtgaaaccgcgtctctactaaaaatacaaaaaaattagccgggcatggtggcacgtgcctgtagtcccagctactcaggaagctgaggcaacagaatcacttgaacctgggaggtggaggttgcagtgagccgagatcacgccactgcactccagcctgggcgagagagtgagactccgtctcaaaaaaaaaaaaaaaaaaaaaagtttgaagaacaaagacaataagaggaaatataatgagtggtcataaatgtgggctctgacagtagagtgcctgggtctgcatcctggtttcttagtcatgtgaccttaggcaagttactttaacctcgctgtacctcaggttgtccatctgtaaaatggggataataatagtgcctaccttttaaggttgatgtggggattaaatgaggtgttgctcatacaggaatgtgcctgtgcatggcaaagttcgggaaattttttataagctgttctaggcctgaaatcttcagaagatgctaatctaaattcatgaaataagcttcttacaacagaaatgctgctagtattatgcaaaattaatgttgtatatcaaacttttaactctcatccctccttattcagatatattttgttataagcaatgtttgttcccctcgttattataccacagtctacttacctgatgctatatctgcctccccagttagactgagagaacaggggatatacctaaataataataataataataataataataaataataatggagagctccttgaagatagggagcctgtaagaatcattgagggcttattttgtataccaactgctaaactagatgcttcatacattgttgtcaatactcatgacagccttgtaaagtagaaattaattcttccagttaacactaaggctgacatatgaataccttggcaaatctggaaagctgggaagacagtatttgaattcaagacttcttgtcaccaagggccatgcacttgtactctgccatgtggcccttttttacctcctgtggattctccctacctggtacttggccttaggtgtacacacacctggcactttgcttgacacataataggtggaccacaaatatctactaaatgaatatttgcatatagtaatattttaaggtactaaaagcagctcaaagtaaatatattaatatattaattccattgctatctggataaccactcaactttcctgctgaaaatgcccatttaattaaagaaggttggatagagctctctatatgcattttggacaggcaggggtttcaggtcataaacattctgatgagttaatataaaataagagaaactgtaaatttccactactaaaaatcacaaaaataacagaaacaaaagaagagataagaatttggggaattgtgctgaacaatttagtggttaaaaaaaacaactgtgcatgtttagacttaaataagcccccatccaagtgtgaggggtccagtaatttttcaaaacatatgaaagtgttaatacatttcgacaaaggaccattaaaaaagtcctgaattctgacttgagggaggaaagtaatgactaatacattctctagagacttgcagactttgggaattcataaaggaatggatgataattattaactgttgctggctgattgcccagacagttctcaacagccctgtacaagtctctgggtttgggatggatcaattctgagactggaaaatggccaaatctttgcaaatgagaaatatttttcttataagttcttattgtaggcaaataattacatagattattcatcagagaatttttaaatgctcataatctcaactctttcatttacaacttgtatttccaatagtttatgggtcatctctgcatagatgtcagaagtcacctcaagtttagcgtgtccaaaatctaactcacaggtctgtttctgacctcccaacttgctttccttgtgtttttcctatgctaatgatccaccataatcaaaataattaacatttatccagtgcctactatgtactattccctgtcctgttttacatttactcatttaaagtccataagaaacattaaatctcatctgccttctgaagaagatacaaccatgctctcttttacaaagtaggaaactgggtcacagaaaggtgaagtctttaaggctgaatcacagtagctcatcctagtaaatagaaaagccaggattcaactccaggggctgggtgcagaactgctattcttcactgcttcaccaatcagcagctacccaaggcagaaaactttttcatccttggctccttcattctccctgtcaccccagatcccctctacatctagtcagagaataggtcctgtcaattccaacttctctatatggctcctctcaggcatgtgcccttaattggcctaattctctaatacaccttccctctacatgctcactccctcagatcattgctttatcacgtgttacctgggttgctattacataaagagcaatctttctaaaatgaggatcttatcacttcacttccacactaaaatgtttttcctggggaaccacactccttagcaatctgacccatcagaccttccaggctgtctcctgcctgctccctaaggctccagccacacagaattatcatgggcccacacacccaccaaatcctcccatgcctttgcccatgttgtctgggatgcccttctctcccttctgtctacatcaagcatcagactgaatatccctcttgtgcggccttctaaaacctcccgtccaaagcgaaatatattgccctctatttatacttttacagcatttggcacacaagtacagagtagtagctttttatcacattctctgataattatatagatatggtatttcttagctctctctccaactggctaataagttgctttttgtctgagtgcctaattttgtgttttgtgtctgagtgcctcagttcctcaaaaaaaggttttttgattagttcattattcatttgaacatggaaattatgctcactagtggcaaatgccactaaccgtattccagaagctaggtgtcatgtttgcaataagatatattatcccttctacaagtcaccttttatttcaggcatttgtaaatgcccattaataaagtatggttcataaattttaccttgtaagtgcctaagaaatgagactacaagctccatttcagcaggacacaataaatattattttataatgcatctattttgtgttttactttgttttggtttttgagagcaacaaaaatgaagtaaacagatgaaacagcaaaggagacagtccacatgataaaagccctgtgctgtctgaaaacccaggccctgagtggacacaagagaccaagggattgagggtataagacagacaaagaaaaaaagaaaagctgatgtagagagatgattgggaccttgagaggagactgagaagctagagacaggaaggacaaatgccagaaacagaaaaaacccggagggcagcagaggtgcttggttaaggtggagaagagagttctgccttggtcaacctagagagaggaaattgaggacttaaatcacgttttgggggtcatctccctccagggaagaagctttgtcttattcatttttcactcacagtgccctatcacaggagccaatgcctagcagagcttagtaagtatttgttgaactgaatttggattggcacccacatatcagaagaggaaagagagtcctggaaaccacattcagagtccgagtcccaaattggagagtagaaattctctgtgtcacccatagtgccacttggaggaaagggataaaaagactgggcttttaactgaggagaatgaggttgtggtttccacagaactgtaggtgcagggcctctgaatgtttggtaaacactgaaggggaggtgacttactaacaggcgctgtgagatagcaaatggtttttaggcctgagacaaaaccacttcctctattccctgcttatcagaggccacagctgctctgttctgagccagcgtttgcagataagcctggtcttccagctccccacctacatcttcttgtggggttgaaattgactgctacccatgtagaatttcggagtccctgtgtagaaactctgtaggcagatacagcaaccgtttgagaagataaatttcgctagtgtttctccagtgctttctgaggtttggcacatttcatttcatttcatctacacattagccataggactttcagcttgaaattacctccacctccttaccctcactacctccaatacacagcttcactcattcacacaatgcccattcattcttctgggataagctcaagcgtcccttcctggggggaagttttccctgttcctccaggccatatctgatgcccgtgttttgcgctcatagtacaacacctcttgcctttacagcagttttcaattttgtctttaaatatttctccctgtgattattttattaattcctctcttccgtcactggactgtgagttccatcaggacacagatcatgcgtggttttgtcaccatttgtatccacagtgcctgacccagtgcaagtagtcctcaatttgtaatactttaattattgaagacgcaatagcttatcagcctttaactgtgttagctggcatgttacaatcctttggcatatgtatcaacgacaaagccaggtatactgtttatttctgaagtatattaccttcatagattctataaaacccttggttggaaatgcactagaaaatattgattttacctgctatgcaggagacacagaagagttaacacagcagggctaaaactgctgtcctttgaagggcatgcttataaggttggcccttggctggtgtctgagaacttggactttgggacggttcctaccattccctgataagaattccctgataaggtacttacactgtacctaaattgttggcacaacaatttgttttttgctgaatatctgctttctttcttggattctggaattttggtgcatgctaggtagagggtgcctacgttactgcctgcagagaaaaaccctaaatgcctaggctccatcgagcttctttggtagattacatttcaaacatgacacaacatgttgttgaaggaattacatacatcctgtttgactccactatgagaggactctagaagcttgcacctggtttcctctggactttgcccttttgcctttgctgattttctttgtgtttattcactgtaataaatcggccatgactatggctatatgctgagtcttgtgagtcctcctactgaatgactgaatctgggggtggtcttgaaaaccccaacacaactcctgaatgtcactacaatctatctacctctctttcaccactaactacagtagtccaggttgccatcatctcttacccagacaatagcacttgacctcttgcagtcgtgcctgctcccagtccaatccattctctacaccacaaccagagtgatctttccaaaacacaaataatggttatattggccatgctaatgtcatctggtggcagaaaggaccaatggattgctgtggtataaggctttgtatatgtaataacttataagttgaaaatttataattaagccctggcacagtggctcacgcctgtattgggag

SEQ ID NO: 3158 - DNA, 1021 bp, Homo sapiens
catcagttgaaggctatttgacagctttggtttcttagctacagggcttactatgtaagtttctgttgtgcaatagttgaccttgaaagcagccaaatccccagggaagtgacaggtgatccggagagcaaaagagggtagcaagcaggagacatgaggagcaggcagcaaaaagctgtcaggaatgaaagggtcatcagaagatccataagttgcagaaatttgagcagttggaaactaaattgatattgatgatttgaaaacattatcagaagaaagtatgaaaaatgaaataaaaagtagaaattaaggaaataaggataacaaaaggaacacttcagagacccaactcgaatgtttggacttagaaagtattatagcatttaaaataccagtattaagagttattttcagaaatgctctaaggaatgtttctattctatgtgcatccctgtgcccttgtgttaggggttgaattgtgtctacctctccaagaaaaaaaataaattgaagtcctaacatccagtacctgtgaatgtgacctcatttagaaatgagtctttgcagatgtaatcaagtaaagaagaggtcattaagtggactctaatccaatatgactgatatccttctaggaagaggaaaaatgccatgtgaagatggaaatataccataggatgacagaggaagagattggaatgatgcagttgcaagccaaggcatagcaagatttgatgtttatcactggaggctgggaagaagcaaggagagattctacccagagtctcagagcaaccatggccatgatgacaacttgattttggatttttggcctccagaactatgagagaataaatttcttgtgttttaagctattcagtttgtgatacttagtaggggcatccctaggaaactaatacaatttatttatctctttcttatatcatcacatcacttaaccagcaaacttttattaaacatctactctgcataggtaattctgccccttcatttcacagctttg

SEQ ID NO: 3159 - DNA, 3071 bp, Homo sapiens
agaggttgtcaaaagttctgtgcaacctttgatcctctcatttttgttcattctggagcaagcaaaatctcattgccccaaagtggcaccacacactgagctaatttgcctttttttaatccttccccaaatcacagccagttatgcctccataatgtgctagctctcccattcaatccagtagatggctttttatttttttctcaagatttttaaattgtgaatgggaggcttggtctgagttatctattatttctttattagactcagaggtccaaaaatgcttagaagatgctcaataaatactgattagatgaaagactagaataagtgtgtaagttctgaatggaaataaacatgtgagtatgtggatataattatagcagagagaataacagatatattcagcaggacctgggggactctagcatttgcacccacttggctacatttgttaattatgtctaatccccaatgaccctaaacaaaaagatttaaaaggctgctgaaaaccgtgttttgtgcaatgcacagaatgttatatgaaaacacgggatcccaaaaagggaattcaaaaacatgcaaacactacagccaatgggaaagattgcatagaaataaataaaaatacattgaaagcaataaatacacagtgagtgcctacgcttctctgtttcttcttgcaagtcacactgcaagttctcatacttttttttcttctcagatatttaagtaaatttccgatattccttaactatctgcctttctgtaaatttcttacctatctgtaaaaccttacagaaattacagaattgggaaaattttttctgaaagttttatccttaatccttgaaagcataatccagtttagagttcccagtttcctgagcattggttactatggtctactccccacatcccgaaatgatgttgcactatcttctttctccttttacatgtttggccaatttaatcttaatattttgaatttgatgcttttctcttttctacctattcttcctaggttatgattttattcatattcacaaataaaaatattgcatctgtaataataatttgagacgaagccattactctaatcctgattttttgcctgcgccacagacacaaattccagatgacctgtaggacaaagcccatgtagattttcaatgagcttttcatctcaacatgttcaaaactgtactctttatctacttattgccactatctactcccacacctattttcttcctatgatgcctgctttatcaatgtcacaaaatactctattgtaaatagtcctggaaactccaagacatcattaatgtgaatgtaggaaagagatgataatttaagttagaaaaggttggtcagagaagctgccatatggtagaatataggcgaagtaaaacaggtgtagaacaaacatgagccaatttaaaatatttcttctccagggaacttaatgtttccttgagaatttatgcctgtggacagttctattactactactcaagctaccaactattatggcagatgatgaagatcatacacactttgtgaggtgctgctctgagtgatgtatatgcacttattcaattaattcttacatgaggaaactgagactcaaagacatagaataatttgcagaagtttacaagttgagacttaggactaaataacttcatatggaaagttttgtttttaagaaaaggaagaagcagatcgcaattctacaggtacattgttatttaacttcaagaagaaaagctatctagaaacagccttaaattataacaaattgttctcatctcactttgcctcctggtctcattagaactagtattggaaatcttgtcctgtggttctatggccagcttcccttaccctactgagaaggtaagtacttaccagacactacaactgacaccagctctcagatttcccctgctgccctgctatattcaacaaaaaatataatagaataaaagctaagcaaccaaccctaactcttacaccgagttaacctgtctctgtgtaacctgtttgagtatttacatatacaggtttatttacatttacatatacaggtatatgaaaataggattttaattcaaattcctaaaattaaaaaagattgatagagcatgagcaaattatgagtttgaaaaatccccaatcattttcagcaacaattttcatgtttacatatgcccctgtattctctactttatgaattataaactccttttgcatactttctctctgcaggaaaatggatgcaagttttaaatatagatttatgacttttatggaaaataataattaggtagttctgtagccttgggcaaatactgtaatttccctgcacttcatttccttatctttaaaataaaggtatcagaagagattatcttaaaatgtccctccaagttctaccattctgtgatacactataaaataaactaactaactgccatttagggatgtctccaataacgtgacatatatgagttccatttacagatgactatgccctttattgaccttgacatagcctctccagagttacacattatagtaagagatgtatatgcatttagctccatttaacattatggcatcagggaaatgaagaattggagctggaatccaattcttgatattttataatcactgcttctaaaaatctatacctagcaataaaaatgtaataaatacctttttttttgtgccacccggttaaaagttagttccaaggatgttacaatgaagctgtctgtacaaataaatctgaaaatgaaactaaaaagatcataaagaaagtgtctgtttgtatttccaagggtgaatcggcctggaagctgttcattctctcccaagcctgaaacagcggataaacgaccccacctcatgctgggaagagagagcttgggatccctggcacgtgagaaccagagcctggtgtagatcagagctctccatccagagtgtcatgacttagctgcatgctttcaccagcagggaggagggaactgatactggagtgattcataaccttctaaaac

SEQ ID NO: 3160 - DNA, 4931 bp, Homo sapiens
ggattcctacaggaagcaagtagtaattgatggagaaacctgtctcttggatattctcgacacagcaggtcaagaggagtacagtgcaatgagggaccagtacatgaggactggggagggctttctttgtgtatttgccataaataatactaaatcatttgaagatattcaccattatagagaacaaattaaaagagttaaggactctgaagatgtacctatggtcctagtaggaaataaatgtgatttgccttctagaacagtagacacaaaacaggctcaggacttagcaagaagttatggaattccttttattgaaacatcagcaaagacaagacagggtgttgatgatgccttctatacattagttcgagaaattcgaaaacataaagaaaagatgagcaaagatggtaaaaagaagaaaaagaagtcaaagacaaagtgtgtaattatgtaaatacaatttgtacttttttcttaaggcatactagtacaagtggtaatttttgtacattacactaaattattagcatttgttttagcattacctaatttttttcctgctccatgcagactgttagcttttaccttaaatgcttattttaaaatgacagtggaagtttttttttcctctaagtgccagtattcccagagttttggtttttgaactagcaatgcctgtgaaaaagaaactgaatacctaagatttctgtcttggggcttttggtgcatgcagttgattacttcttatttttcttaccaattgtgaatgttggtgtgaaacaaattaatgaagcttttgaatcatccctattctgtgttttatctagtcacataaatggattaattactaatttcagttgagaccttctaattggtttttactgaaacattgagggaacacaaatttatgggcttcctgatgatgattcttctaggcatcatgtcctatagtttgtcatccctgatgaatgtaaagttacactgttcacaaaggttttgtctcctttccactgctattagtcatggtcactctccccaaaatattatattttttctataaaaagaaaaaaatggaaaaaaattacaaggcaatggaaactattataaggccatttccttttcacattagataaattactataaagactcctaatagcttttcctgttaaggcagacccagtatgaaatggggattattatagcaaccattttggggctatatttacatgctactaaatttttataataattgaaaagattttaacaagtataaaaaattctcataggaattaaatgtagtctccctgtgtcagactgctctttcatagtataactttaaatcttttcttcaacttgagtctttgaagatagttttaattctgcttgtgacattaaaagattatttgggccagttatagcttattaggtgttgaagagaccaaggttgcaaggccaggccctgtgtgaacctttgagctttcatagagagtttcacagcatggactgtgtccccacggtcatccagtgttgtcatgcattggttagtcaaaatggggagggactagggcagtttggatagctcaacaagatacaatctcactctgtggtggtcctgctgacaaatcaagagcattgcttttgtttcttaagaaaacaaactcttttttaaaaattacttttaaatattaactcaaaagttgagattttggggtggtggtgtgccaagacattaattttttttttaaacaatgaagtgaaaaagttttacaatctctaggtttggctagttctcttaacactggttaaattaacattgcataaacacttttcaagtctgatccatatttaataatgctttaaaataaaaataaaaacaatccttttgataaatttaaaatgttacttattttaaaataaatgaagtgagatggcatggtgaggtgaaagtatcactggactaggaagaaggtgacttaggttctagataggtgtcttttaggactctgattttgaggacatcacttactatccatttcttcatgttaaaagaagtcatctcaaactcttagttttttttttttacaactatgtaatttatattccatttacataaggatacacttatttgtcaagctcagcacaatctgtaaatttttaacctatgttacaccatcttcagtgccagtcttgggcaaaattgtgcaagaggtgaagtttatatttgaatatccattctcgttttaggactcttcttccatattagtgtcatcttgcctccctaccttccacatgccccatgacttgatgcagttttaatacttgtaattcccctaaccataagatttactgctgctgtggatatctccatgaagttttcccactgagtcacatcagaaatgccctacatcttatttcctcagggctcaagagaatctgacagataccataaagggatttgacctaatcactaattttcaggtggtggctgatgctttgaacatctctttgctgcccaatccattagcgacagtaggatttttcaaacctggtatgaatagacagaaccctatccagtggaaggagaatttaataaagatagtgctgaaagaattccttaggtaatctataactaggactactcctggtaacagtaatacattccattgttttagtaaccagaaatcttcatgcaatgaaaaatactttaattcatgaagcttactttttttttttggtgtcagagtctcgctcttgtcacccaggctggaatgcagtggcgccatctcagctcactgcaacctccatctcccaggttcaagcgattctcgtgcctcggcctcctgagtagctgggattacaggcgtgtgccactacactcaactaatttttgtatttttaggagagacggggtttcaccctgttggccaggctggtctcgaactcctgacctcaagtgattcacccaccttggcctcataaacctgttttgcagaactcatttattcagcaaatatttattgagtgcctaccagatgccagtcaccacacaaggcactgggtatatggtatccccaaacaagagacataatcccggtccttaggtagtgctagtgtggtctgtaatatcttactaaggcctttggtatacgacccagagataacacgatgcgtattttagttttgcaaagaaggggtttggtctctgtgccagctctataattgttttgctacgattccactgaaactcttcgatcaagctactttatgtaaatcacttcattgttttaaaggaataaacttgattatattgtttttttatttggcataactgtgattcttttaggacaattactgtacacattaaggtgtatgtcagatattcatattgacccaaatgtgtaatattccagttttctctgcataagtaattaaaatatacttaaaaattaatagttttatctgggtacaaataaacaggtgcctgaactagttcacagacaaggaaacttctatgtaaaaatcactatgatttctgaattgctatgtgaaactacagatctttggaacactgtttaggtagggtgttaagacttacacagtacctcgtttctacacagagaaagaaatggccatacttcaggaactgcagtgcttatgaggggatatttaggcctcttgaatttttgatgtagatgggcatttttttaaggtagtggttaattacctttatgtgaactttgaatggtttaacaaaagatttgtttttgtagagattttaaagggggagaattctagaaataaatgttacctaattattacagccttaaagacaaaaatccttgttgaagtttttttaaaaaaagctaaattacatagacttaggcattaacatgtttgtggaagaatatagcagacgtatattgtatcatttgagtgaatgttcccaagtaggcattctaggctctatttaactgagtcacactgcataggaatttagaacctaacttttataggttatcaaaactgttgtcaccattgcacaattttgtcctaatatatacatagaaactttgtggggcatgttaagttacagtttgcacaagttcatctcatttgtattccattgattttttttttcttctaaacattttttcttcaaacagtatataactttttttaggggatttttttttagacagcaaaaactatctgaagatttccatttgtcaaaaagtaatgatttcttgataattgtgtagtaatgttttttagaacccagcagttaccttaaagctgaatttatatttagtaacttctgtgttaatactggatagcatgaattctgcattgagaaactgaatagctgtcataaaatgaaactttctttctaaagaaagatactcacatgagttcttgaagaatagtcataactagattaagatctgtgttttagtttaatagtttgaagtgcctgtttgggataatgataggtaatttagatgaatttaggggaaaaaaaagttatctgcagatatgttgagggcccatctctccccccacacccccacagagctaactgggttacagtgttttatccgaaagtttccaattccactgtcttgtgttttcatgttgaaaatacttttgcatttttcctttgagtgccaatttcttactagtactatttcttaatgtaacatgtttacctggaatgtattttaactatttttgtatagtgtaaactgaaacatgcacattttgtacattgtgctttcttttgtgggacatatgcagtgtgatccagttgttttccatcatttggttgcgctgacctaggaatgttggtcatatcaaacattaaaaatgaccactcttttaattgaaattaacttttaaatgtttataggagtatgtgctgtgaagtgatc

SEQ ID NO: 3161 - DNA, 232 bp, Homo sapiens
tctctttcctcccatgttaaaatcggtagcatgtccaagcctctgggcctactgccttcggttagctcacacttgctttttcatgtgaagtttgttctatggcataatcttagtaaagcgttttaaaaacaaaaagatacggaggctttttacaaccccttcgcctaattatatgattcattaaaagaatcttgggggtgggcatgagtcaccacgcttggcttaatcacag

SEQ ID NO: 3162 - DNA, 3141 bp, Homo sapiens
agataatagacataggaacctaacagctcccagaagccagactgagaaagaaaagcataaaggacacgcaacagcatgatgcctgaggtagaagtatgatagttgaactttattgtgctctagaaaaagcaataaacccttctgcaaacttcataagatagcacagtaaaaggaactctacaccaagaggacattttcccttcaaaataacaaagcagaacacaaagtaaatcaaagcatataaacggagaaaggaattccgttgcctttgaaattgaactccagaaataatttacttaaaaagagttcctcagatatagcttgaagtctaaagacaatcattgatcatcaactggtattctcttactccatcagcactccagatacaaagcaagagaaaacccagagtaaaaaatttaaatggacaatatttcatctgcaacctggaaagtcttctatgcttgctgttgtattgactttcctacttatctcagaaaattgtgcatttaatcatctctctctattttctttgactcttttccagtgagagagtataagattgtttacctaaagacctcgaagtctagcaagataggaagcaagttgttacttaagcaggttgggggggcattatgggcacaatgaaaattaatcattggttctctttgcctatcaaaatacatcgttcacataggacccctttccccaataaatttagatcatgcctactctagaaaaggaatcacagcattgtcacttcttgatgttgtgaagtaatttgtaatgcgcagaaatgatttgaatacatgtcccaacagagctttgtgaaggaaactcaaagctattctgacataatagcaaatgatagcagagaagggactgaagcactgcagcaaacccaaaattgttccaatattcagctgctagaacaaaaaagaaaagcctcactactgaacctttttcatttcgtatagctgctcaaaatttagaaaactcatagaccataatccattaaaacagcatctattacatcaagttctaattgctaaacttgctggtaaatccttggggtaaagagattggaactcttccattttcaataaagattatttgtaaaactaaaaaaaaatccatgagacaatctgatagatgtctcattattcctgatctgtgttcttttttatttcttagccctacctctacaaccgattaaaatgcttagcctaaatactttcaccatttcaaagaaaccactacaaaaagtgctattttttggccgggcgtggtggctcacgcctgtaatcccagcactttgggaggccaggcgggcggatcacgagatcaggagatcgagaccatcctagctaacacggtgaaaccctgtttctactaaaaaaatacaaaaacataattagccgggcgtggtggcaggtgcctgtagtcccagctactcgggaggctgaggcaggagaatggcgtgaacccggaaggcggagcctgcagtgagccgagcacgccactgcactccagcctgggcgacagagcgagactgtctcaaaaaaaaaaaaaaaaaaaaaaatgctgtttttttcctggattttatgaggataaaatttagataatcttttaaaaatatgtacaatataccaaactatttaaatagacattagcattttctgttaaagtactgacatagtatttgcaactattttttaaatcatttttctactcttgatcgtttatagtcagaatttcagtcaagtttagcactatccaaaaaaatcagacaggatgtgttgcttcacaaataagaagctacatgtaagtcctgaagcacaaggtttaaggaaaggatttcagcaatgacttattcagcagatactcatcatatttcctcttgtgagttctgttatatagtccatattcctatgcttagagcagggattattctgcctcattggccttaaactacatcagccctataacctctacttccccacaggtttcagtgatctcccaattctgtcgcagaaagcttttccaacaaagtacacatttatattacaaccacaccccatatgtcctccatgaactcttattaattctccaatacacatgccattttattgctctgtgaagtcttccatgttttttccacgcatgctttctctgctggcctctgtgtatacctctattatatcatatagttctgtgcttatcacgaatttttgataatgcatttctggcaataaaggagaataaaacagaccctccaaagagtttggatgaattagagcaaggtggcttaccatcagcataaaatttcttccttaaagattagtttaattttattttagatataggggtacatgtgcaggtttgttatatggaaatattgcatgatgctgaggtttggaatatagatcccaccaccaggtagtgagatgctaccaggtagtgatacagatgctcccaccaagtagtgagcacagtacgggttaagtagtttttcaacccatgtttccctccgccattcctcctctactagtctgcagtgtctattgttcccatgtttatatgcatgtgtgttcaatgtttagttcccacttataagtgagaacgtgtagtatttgcctttctgttcctgccttaattcacttaggaaaatgacctccaactgcatccatgttgctgcaaaggacatgatttcttgaaatcatatgttttatccggtaaaaataccttaaaatatttcatgctatgccattatgtgtccttttaaattatttgtcattaataaaattgaagtttaaaattatttctaatgttcagcctttgttttgtgttctctttgcattagcactgtacacattcagtttaagaatcacctttttagattcccaacaaatggaaaagtgatatttgtataatatatatattttgtaaaacacaaaacaatatgcagcagaaaaattattgcactaagcacatgtattagaaaagaagattctcaagtaaatgacatcagcttctacatttttttcattatactttaagttctgggatacatgtgcagaatgtgcacgtttgttacataggcgtacacatatcatggtggtttgctgtacccatcaacctgtc

SEQ ID NO: 3163 - DNA, 3943 bp, Homo sapiens
cctaattgatcacatttgagaagtctatattttaataatttgcagtttcataatacatttatatatttcaaaaatataaccaacatattagttagaaatattatatttgttactattgatatgatttgacaatcaaaactttactgggttaaataatatttacttagctaagaactcacaaagatgaatgacgggaaacaacctttacctggaatttactgcttttggtattcaaataagatatgtttcaagtattaactgtggtcttctcttccctcgcaggcttggaaaagcaccagataggaagggaagaagctcaggatctgggtttaggttctaactctgaacttaccatctatatgatgtcagctaagtagaccattttgtgattctgagcttcagtttttctcatccactaaatggggaaaaaaaactgctttacagagttctaaggattaaatgggacatcttctatgaaaatgcctggtacaagggaggccctcaagaaggtctgtcatcccttacactgaatcaggactggcgtagtgtgacctgtggaatacagtagaagtaaagatgtgtgactcccaaagcttggtcatataaggcattgcagcttcagccttgctctcttggatcacttaccctggagaaagtcatctcccatgctctgaggatactcaagcaactctgtggagtgttccacatggagaggaagtgccgaagacccgcaccaactggccaaaaaagtgagtgggtgaccttggaagcagatcttccagccctactaaagccttcggttaactgcaacctcaagagagaccctgagcctggatggctcaactgatcagcttctgaattcctgatttacagaagctatgagaaataaaaagtgattactattgttttaagctacaaaatttggggataatttgttacatagctatactaactggaacacagagatttcttcaaattttcaaaaatttttttactctcagtgatgttcattgtcttggaatgagaatgggaaacatagaggtgggagatagaaatttaatggcttagccagccaaatgaaccacatcaactctgcccattggtggggagacagatatttcagtcatattgtccatcatatatccctactttttgtggccttgcaaaataactaataaccgtaaagctgtatcatcacaatgcaataataataggttatttcagtaaaaagtatgtcaaattaaatgttagaagtatgtcaacacaagtggctgattgaatgaattttttactttagaactgattatttggccaaaacgtagaaggttcttgggatcaaattttaaagctaaaaatactaaactacattttttagtctggggaagggatcccagatttataattttatttgggttttcctaagtatagtttaaaacaagttttgctgcctttaatggaacatgaaattatggatcaggtgacaggaacacagtatgttccttttggattataaactggaacttcagatgtcttccttgaagattttgaaaaactgatctattatatatgtacataaatacctggcctttggccttcctatgaagtgatctgcaagttcataaagtattgttctgtttccaggcttcagggtattaaaaatgtatatgttcatttgtttgaaattatctgaagctctgggcttccccatgctcacccttgactctttcctttttgatatgttctgcatatcttggtgtatttatgaacgactttttagatgtaagtttgaaggaggagattctttaatctctgtagttttcatcaacagagtgccattttcccgggaattactatttttccctatggccttgaacatggcttgttattgagtggtctagtctcctgacctgttaggccatagaattagaaaaacccttgtttccactttcatattccttatatataacatcttaatgaaaccattgtggtttatttgcacagaagctcccttgacttctcttgggaacctgctctaatactttgtggctcttgttcatgagaacattctttttcctaatatctgctctaaatgttaccttccttagctgaaggctttctgtcccccattttttgaaactacaagtgattccctttcctcactgaagactaaactttatacctaatggctagaatgtcaaacaaacattaatcttgtctcctgcctcttttcagatggaggaatgcccaaaagcaatttagctttagacagcagatgtatttgtgtagtgttctttaacctctgattcattttctcaaatcattttgggttaagcttcacttctcaaagattccaacagcctaaggatctaccttgaaatttcataatcattccatacacctacctttcgttttaaattatgtctctcccttacataagctacctactgtaaaaaggatacttatacatttgcaaaagaccatttatttgccacaacaatacatgtatcaggtttgaaattttctcttcgtagatagggcctactctaagaccacttaatacgcaaaaaattcatactttccaaagagctatgtaaggggcaattgttcacatccaggcaaacctccccactttcctccactccaaacacatacacatgggccagtcacacggaaattccacctttaggaatgtagcccttagggataagtagttcaagattttaatgtagatcttctgggaggacactggaaattcttgatactcttgcttcacacttttattaccaaactaagtggggtggggggtggaatttcaatatgaagacctgaaattagaataagctagtactttgagccagcaattatttattctttttaatatgaattagtgtgatctcttctttattgttaagatagttcattgaaatattatttttgagctagtgaggatttcaatgaaaagatgataattggtcttcttctgggaagagggcggtgatgactagcacaagacaattttcaagtgaatgggaaggctgaccagtgaaagacactttaacaaggggttggggagtgttagaaggcagaagaattgtatagaagagcatctgccctccatcccaacttaaatctgttgcactctcttttattcatgcactagaaaaattcttaaagctatgttgaagttactgagttgcttgtctgttacccccagtcaactctttgaggatagaaagaaggatgctgtgctgtggggggggaatatgaatgagataacaggagcatagaggtctggaggaataaaaatataaataatttcatactaccagctacagaaagtaaagccaaatgacattagaatgaaataccccaatatctaagaagattttcaatgatgctgaaggtagcgtgtcaaaatatggagtacactacacgaagttttaagctcattgaaatggagtgaaaagggttgagaaacatcgctccagatgctgggatgcaaacctcatggaagtggaaaaaaaaggagttagatggtccagagaagaccaagtaagttcaaatggtctgttgaaagaaatgataacaatgacaatgattatgatgatgatcaattttttaaatatactttaagttctgggatacatgtgctgaacgtgtaggtttgttacatagatatacacgtgacatgatggtttgctgtacccatcaacccgtcatctacattaggtatttttcctaatgctatccctccactagcaccccccgacccctgtcaggcccctgtgtgtgatgttcccctccctgtctccctgtgttctcattgttcagctcccacttatgagtgacaacatgtggtgtttggttttctgttcctgtgttagtttgctgagaataatggtttcaggctaatccatgtccctgcaaaggacatgaactcatc

SEQ ID NO: 3164 - DNA, 8811 bp, Homo sapiens
ctgggaagttcaagacctggaggctacatctggtgagggcctcatgctgtgtcataacatggcagatggcatcacatggaaggagcatgttcaaaagagaacaaacacaagaggcagcctcactttataataacccactttcatggtaactaatccagtgccacaaaaactaactcaatcccacacaaagaaagcaatgcatcctaatgacctaattgcttcttaaatgaaccacctcccaacactgccacattgggaatcaagtgtcaacacaagttttcatggggacaaaccatcttttaaccatggcacttactccctcaagtatctgactttgatccagtcctattttgccattacttctgtcttggtattggcactttagaatcccatccagcttaaatgcatggaatgagtccagggaagagaaataaggaaaggaagtgatgacaaagacatagatgatgagagggaagagacagccatcattggctctgaaacttaagatcttgtcaaaataatgccatttttttcataccagttgtcaaacttccaaagtatgcactttaagaaacaggtatccctcataataacaagtccagtaagctgctagtgttttcatcattgagaaattgaagtcaaaaccatctgttcatgaaagttaaatgaatcttcattatttaatcaagataaggttatctcttcttagtagtacttcctcccttttctctagcacccacattttacgctgtcaggaaagctcatggtactaattactccaagaagctttttcttacccctgcactgatccctctcttcctttactttttctttcctctgaactaagatatctgtgtcacactctcctgtgtcactataaaagatgaattttttctgattaattaatgtggggatggttgccttccaatctagacagaatgcatgccagccaatgaacagaaagcccagagggccatgccttctgctttctttacttcatccagactcctctagctagtaccatatcatgactataatatattactcagtaaatgatgctcaaaataataatacacatgaaggactgctcagattattacatcaaaagcctacagaatgctcagaatgttatcttcctgaattaggataatctcattaagtctggcatgcacagtgctgagtgaacatgaatgacatacttgagagacagctcccaccccatcagattattaagaataccaggttatctcttcaggcaaatgcctgagcttgggcctcaacagaaagccaatagtaaagtgaacgggctctcagaagatgcacatttccttctggcctctactctggctaaaggagctttcgcaaagcaatcggctaaggatattttcaacatttcaaatagcaaagtcagctcatgcatgaagcagtcactatggaattctatgcatgtctccagaatggaggccagatccgatatgacaactgccaggtgaaaatcacagaagcattatattatgcaatttgatttcaagccagaatgttctgcatcctcaggtttccagccagacaaaacatttttatgttaattaaatgagatagtgtgtgtagcacatggcccattatagttccttataaatggtagcttttgctatgatcattatcattactattattattattattatccaatctgcagtctaagccccacacagtttcccacctaatcacagacatcctggctttgtttttaagagaccactttccatcagcaaatggaaaatggtgttgaagttggagttttcacaataggctgacttcccaataggcctaagatgagccctgagtgctagtctctatatcaagcgtcagccattccttctatcctgcagcatgagagcctcatagccaagcaaaaggagcataaattttgaatcacacagtcctgtatctgaatccatttctgctacttattacttgattgccctttgattaattacttaattttattgagcaacagttgtctcatctcttagtatttacattgcagagtttgcagaggatattaaataagaaaacgtatgcaaaataccaattacagcaccagacaatggtaggcattcaactgaaaatagtcattatttttattattacgaatattccctatctgtgtgataaggcttttgtctcagattctgagatattaccatcaggactagaactctgccatgaagcccaacccacttggctgggactgagttctcactggggccccttcccaagaaggaccacctggaaccaggaaacaactacccacttgaccctgagcatcacaataacttagaaattccagccatgtctctcagagctgacaagaccctctttgcttagcccatgccctggtaacagttattttattatctactctgtggcaggttatatgttaaatatctttcatacataatcactaatcttccaagggaatccaagagttggtttggtgaatgttattttacagttgagcaaactaagactcggagaggttaaaatgacttgctcagggtcacagagctggtaaagggcagggtcaagacttcaaatcctgcacacttgtcaccaggtcctattgcttcatatacacagggcctgacactgacagttattcccagcattttcttcctacatggtgatctagtgggatccaataaaataacctgattcttcagacagatccttctatgtccctctagcagcattatattgccccttcatgatgttacaaaccttcagtgttttttatatatacacatacatatatatatattattattatattttaagttctgggatacatgcgcagaacgtgcagatttgttacataggtatacacgtgtcatggtggtttgctgcacccatcaacccgtcatctacattaggtatttctcctaatgctgtccctcccctagccccccaccctccgacaggccccagtgtgtgatgttcccctccctgtgtccatgtgttctcattgttcagcacccacttatgagtgagaacatgcagtgtctggttttctgttcctgtgttagtttgttgagcatgatggtttccagctttatccatgttcctgcaaaggacatgaactcttccttttttatggctgcatagtatttcatggtgtacatgtgccacattttctttatctagtctacattgatgggcatcttggttggttctaagtctttgctattgtgaatagtgctgcaataaacattttttttaataaagagacagacactaaacagctttgtgagctatacagtctctcttgcggtcactctactctgccactgtagtgcacagatatagacagtagataaacaaatgatcctggctgtgttccagtaaaacttttttgcaaagccaggcagttggctgaatttgacccatgggctacagtttaccaacccctgatcattatgcttgctactcaaagtgtggtccatgcaccagcagcattagaattacttggaagcttgccggaaatgcagaatcttggatcccgccccaaatctactgaatcagaatcagacttttaacaagattctccagaagagtcatacacacattgaagtgtgagaagctctgctctacatgtctttaattcattgaatgcctcttatagtccaagcattcttacagggacaatacacactactagatctatagtcctcacaacaggataaggtggctgttattatcccattttacagatgaggaaacaaaagctcagagaaattagatgaatcaaggagacaatagatggcattgaaatttaactagaaattaaacaatctgctatgatattcatctcagaaatggtatgactaaggccacacagaatattccataggtactaactctagatgtgaataaatattgttttcacaattataagcacaggtgtttatatgctaaagtattgaaattatcgcatagccacagaaataaatttttattctcaaagataatcctaaaagtagaataccctttgctaaactgttttctttgcaatttctcttcacaagttctcatttactcagctttatccaacatcaaaaactattcaaggagccatgtcattacttgggcaatatttatataaattttatagtctttttctaatgcctcaaaaaagttttgaaaaacgatttgaggtagcttagagacacataaaatgcaagataaatatgatgtaaacaatgatacagatcattttgggttataaaatatgaccaaggatgaagactatatacaaaattcacaccattatggtcttataccttttctgtggtataaaaaggacaagagcttgtatcatctattacatggtgcaaagagcccaggcttagaaaacatttgcttgtcaaggatatcatttaatttccacttgttcaaatataaattgtggataataatatctcacagaggaagtgtgagtatgaaataacaaatatgaaaaaattacactatttcactactaatttaatgatttttaattataataattcctgatataaaatataattataactaatatttattcattacttatgctaagatctctaaatggattatctcactgtcttcacagcaaccccaaattactaaaattatccccatttgcacgtgataaaacaggcctaagagaagttcagtaattgggtcatccaatgtatcaggtagctactattatatacaaaaccacccagaaacacagtagcttaaaacaataattatttatttgttcccaattcttttggtcagcaatttgggctgggctcaactgagatggttcatctctgctccacgtggtgttggctaggcttacttattctgtgggagggctaggacagcagagcctctctctccgttggtccctcatcttcaaggaggctggcctaggtttcttcacttgttgccaaatgggttcccaggaaggagtaagaaagggcaagcctcagtgaataagcactctttaagcctctgcttgagtcacattaccaatgtcccaaacctagggttaatgtggagagagctcaacaagggtatacatacaataggcatgattctttgagagtcactgtagtaataagatatgttacccagaatataaaagtgttccaagtttgaactgaagaactgtaaattcatatcccatgctcttaaccatgacatcacacttgcctccaagaaaaattcccataatgttttctacatgatgtcggtttctcttttaactcttaaactgccaccttatgaaacagcaaagatattcctaatctcatctccaaatgatttctttctgacttacaaaatcccttgagtctcagggtaggcttagcaaagtacaaattgaagacagattatgttttcattccttaagtcatttgtactactagaaagattgaactttacatagctgctctctagggacctagctgataccaaaatgataccaatgcattaaaagacaacagtattacctcattttgtataacactttactattagcacagaactttcaaaatgaatataaaactcattcatctgggctttccctataggcatctggaagcttctgaagctatcttagcatggtgcaaaggagtgttttaagggtgttaaactgatgtgaaagaagtactgtagctgaaacactggtggcaagaagactaatctagagactgtggcacaagtttgaaagagttatggcaatgaaacatacaagacctcacaaaagaagaaaaactagtccttctaaccatctagaggggagggaaaagaaagagtcggggtgttcaagggttactgttctttttaatgtctttagacttggcatttttccgtttacatagcacttttacctcctgatggttagggagaacaggaatgctcatcctcattcagagaagtttcatgtggtacactgggacctgcaggaactcactgcagctagccctgtaaattgtaaatgtccacaatggaggaggagggtcaagattaaaattttaataaaagtagagaacaaatgacatgattagattggaattttagaaacatttctcagtcaacagagggaaagataggttggagaaagcagagataagagggagaacaattgagaggcttttacagtaatctgggtgaaaggctataaaaatctaagtctgaatgacagaggggatgattctaaagtcaaacaacctgggcatgcactcctctttgctacactattatatacttttttttcttttcatcaattttggctagagaatatacttgtgatggtgtaaggaggagattatgaagattggcttgtttgctctgtaaaatctataattatcagtcattctttgtacccagaggattaagaaaggcatccctgtatctgaaagattcatttttttctacatctctttttataaatctcccacagttaaaagaaaggagagacgaaggaaggaagaatgggaagaaggaagaaaggaagggagagaaggagggaggaagggaaaaatttcattttcacgtaaataatggcatccttcttaaagaaaataaaaaagtagcattagatgaagttctattgacataattataatcatacagtgaagtcctaaagagatatattgtgaagataatttttcttgtcacaaaggacgatctatacaaaagaacaaaggaaataattttaataaaacattttgccctgagcaagaaatgtgcttcatgtatcatacatgagaaaggatagttgtttgatataaaatggaactgtgaccttgctataagagtttttattacttgatgccactgaaagtaaattaatggactcccaaaaggtgtaaaattcattctgctttgtggcatttgtttgctgacagacaagtttaagaggaatcttttcatgtgattatttaaacaaagagcttctaggaattctgatcaacctttaaggttccaccagaggacatttctcatagacaggattcatttgagagagaagtcacacttttaaaagagtttattaacaagagaagagaggttcatgtgctatctgtaatttcaacaatttttgctttcaaatataattttgttttcttttagatttctctaaacaaattcaacattgtttaaaaaatgataaactttttaaaaatactgagctggcaacccagcaaataaactgttttttttaaaggtttttactccatcaagtctgaagtccttacgtaacattttattacatagtgtttctttatagtgtttcaaaaccacatatatttataactgcttaatttatctttacaagctactttgcactatacaaattgcctttatgcctctttagttgttttcaatgactttgagattaggcataacaaatattggtattataatctgacatatgagcaagtttatcctcagagaatctgtcacctgcttaatatcaggaactgctctgatggttggcaatagagcagcacacaagacaggcaaagtttctatcctcgtacagtttatcttccagaatgagatactcacgaatgtgtgaacaaataaatatgtaatataatgccaggagaataataaatggtgatactaagaccatacaagtgaccagtctcaaatctcagaactattcctagcaacttttcatcagcacaaatcctgccaagtggggttgtccaagaatagcatccccgttaagcctttctattacgcctccagctaatgctgataagtatgtatgatgtggctttactggtcacatgaggcaactttggaggcctctacactttagctctacttgtctattcaatgtagatgtgtgtgtgtcattggagagcagcagaccagggaagtaggtgtaaatgttctgaaaaggttacttaaaacatggtttgtgaacacttaagagcatgacatttactagacaccagcatggttcactgagaacaagtaagatcagcagatcaacactacttacatttgcaagagggtcatgaaagagatagatgaagacaatgcaatagaaatactgtgtctaaattttaagggccacctcaaatcattttttagggatcagtttagtgataagcatgtaaaaaatccatgaatacacttggtaaaataaacacataacaaaacatctttgtagaggcatgtgacctgcatggtaatatagttagttgaatttaaaattaatgaaataaacctaccaaaaattgtagctattgccaatccagaggaagggtgtacaatgaaaggcctcgatccttgattctgcgtggtgttttctaaaattatttaaatcagtatgtcaacaaaatgctgataaaactcgcatatgaaataaaggccaagagggaaagcttgcatgttgaaaatcttatttcacttctaagtagagtctgtcatttaattccaaaaagatctgttaaatgcccaccatgaacaaggcactgtgaaaaatgccaaggcaaggaatagctcctgctctccagcgtttcctgtgagcagccattgctgtcccaattaccaccctgttaacaacttaattgtatccccccatccaaagttcatacaacaaagtcctaacttgcagtaccttagaatgtgattgagcagggatttgtcccaggaccccctacagatacgaaactcttcagatgttcaagttccttacataaaatgatgtagtatttgcacataacctacacaagttttcccagatattttaaatcacca

SEQ ID NO: 3165 - DNA, 1911 bp, Homo sapiens
ttctttctttctttctttctttctttctttttctttctttctttctctctctttctttcttcttttctctttctctctgtcttttgtttgttcgttcatttttgagacagagtctcactctgttgcccaggctggagtgcagtggcatgatctcagttcactgtaacctccacttcccgggttcaggcgattctcctgcctcagcctcctaagtagctgggattacaggtgcccgccatcatgcccagctaatttttgtatttttactagagatggggtttcaccatgttggccaggctggacttgaactcctgacctgaagtgatccgcccgcctcagccttccaaagtgttgggattacagacgtgagccactttttctctttcttaaaacattttgcccaatgctaaattttactgcttggtttcaccatagtaatctgctctagaagaaaattaccacaggtgggattgtcaaggtgttccgggataatcatttctactttctttctttttttttttggagacaggttcttactttgtcacccaggctggagtgcagtggcgtgatctcagctcaatgcagcctcaacctcccaggctcaagctaccttcttacctcagccccccaagtcgctgggaccacagcttcaactcactccccaatcaaggtgagtgtgtatctcccatgagtgagtaaactaccacgtgcccatcacccagcttcaacaagcatcgactcactctccaatcaaggtgaaatatcagacatcatgtgattttatcgctaccatagctgcaactattaccagagcgattaaataaaggaaggcaaatatcacagcaacaatgcaccatggagacacggttcaaaaagagagaagttggctaatgtcatcaatggaaaccagattcaggagttgatactgaaaagaactttcaccaagaatatttaacccacttgaattggtctaaaatgtaagttcatgggagcaccgtgctgtgggaaaatatacctcagcttgtggggagtaattctaaaaattattttgcagatttaggtgcatcctgagaagatattaatattttgatgtagatatgcgctgtttatgaactaacaagttgccctagtaaagaactcttccaaaggctacaaaagagcacttcagaaatcctactgtgggtttagttcatttccctcccgtaattttttttttttttttgagacagagtctcgctctgtcgcccaggctggagtgcagtggcgtgatcttggctcattgcaacctctgcctcccagtttcaagtgattctcctgcctcagcctcctgagtagctgagattacaggtgcataccaccatgcccggctaatttttgtatttttagtagagacgaggtttcaccatgttggccaggctggtctcgaattcctgacctcaggtgatccgcctgccttggtctcccaaagaactgggattagaggcgtgagccaccgcagccgcctccactccctaattgttttttttttttttaaactatatctttcatctttgtaacagaactaggttaagaacaaaactccaacttttgctgttggccagacaggtattctgtgaccgttttgataaaagttacttcatcgtgttcatcatgaggtatctcacatcctccatttgtagaaatactgaagcactaaaaagacacttaactttttcgaaattaaaatatcaaaaccaggaaattgtgtatgaaacattctttttccatgatcttggtacaccattctaagtcatcgtggccatcgccgcctggttgaccattctcatttgctcttaacagagcactgtaggttactatgacccactaaaaagtgtagggacaagaaatcaatcctgattcaaacattagctc

SEQ ID NO: 3166 - DNA, 5514 bp, Homo sapiens
tatcagggctgaggagcattcggcggtggagatttaaatctgctcttgctgacgtcaatgaatgactggctgccagtccctgatgtcaccagttcagcaggcacaaatggaaatgctgggtcaattttttattttaaaaagaaaacatcctagtatccaggttttctttctcttttaaaagacaggatcttgctctgttgcccaggctggagtgcagtggcatgatcacaagtcactgcagcctcgacctcctgggttcaagtgatcctccctgatctgtctccagagtaatgggactacaggtatgtgccaccacacccagctaatttattatcattattattatttatagagacagagtctcactatgttgcccaggatggtcttaaagcttcaagcaatcctgtggcctcagcctcccaaatagtgggactgcaggcatgagccaccatgcctggcccacatcttgtcctgtcttccttctcctctcttctcttctcctctcctctctttctgtttttctcttctctctctacctatctatctatccatccatccatccacccatccatccaagcattaatatcccctgtaagcctgtaatctaagcccactgccagttatctttccagccgcagctttttcaagctagtttctttctctcttgcattgtagctcacctttcagtgagagattttctacaacctttagtgcagaacttggcttttgcagctatcttcagttctgaagagaatctcagaattccttcaagacttagtgatagtcaacctatagttccatatcaagcaatttaagcacatctcaaaaagctggtatggagcaaaaatgtgactgttatttaatagtttttaacaggaaatgcggtgagagacattattctaatggtaactaatgcaaaggtgacttacaaccctgttatccaaaagaggagttccatgctgtatgttatactccaccagtcccttgaggatggaattttatctaactgctctatctctagtttttaggaaagtgccacagaaagtcctcaataaatagtctgtgaatgaatgagcgcctatgctctgactcttaaaccagagcatctggtttacctcccacccttcttacaatattcatcttccacaaggaaaaggaaatatcaaaaataatctaaagttttttttctgttctcttcctaagcaattcaatcctaaagccattacgtggggcagagcaaagcagaagtctagagtggggagctggggggctgtggtggcccatgggatgtcagagtgcaagggggcatggaaggcgtgttgctaaagaaaatatactgcaaaaggtcccataattgtataatggcaatataccccgcaggtggccgtttacacagaatttgctgaatcagcattatccatgtgaccagtatgatattttactttcagcaggcatgttcaatagacccttgatgttcaataaatattcatgattttgactatatggagcaacctccaaaaatacattatgtgtaatgactaggaagtttactgaggcacaaactggaatcgtggcatcgtgagactggtatacagagtggatcattccactgatttgtggccttggccaacatctggcataacatcataaccttttgatcagtcatctttagcaaatattcagagtgaggaactggggaaaaatgctattaggcaactggccattttctgacctcagtcccatcaaggttgctggagaaatgctcttcaccagtcttttttcccatctcacagctacttagatataaaggtactctatgtcccattcatcagtcctgtggagaggatgccaatgttcgagagagttttcgtccctgctcttcggaccctcatttgggcttcttttatgtgacaaatagaaggattaggggtcacatcagcaaatgattctgtattcttggcatcgctgaggaagctaagggcaccaccatgattgacatacagggaaaaaacaaaaaactccaattactgcttaggagggagaactaattctacccaaaggagggaagcaccatctgaagcatgtcaaacttggcctgcaaccaaattctgccatcgggtggagtctctccttccatctgggtaataagaagttgcagatggaaaaagcctgctggactactgcatgtactatatgcctcttctgtaagaaatcacctttaaaaagaaaagtttcaaagtttatccaatttggatggagaacggcattgcaagataagtagtggctttaaagcatgtccatacttctttgacactcctcccatcaacaggggaagtctacttcttttccccttgagcatgagctattcaactggcttgctgccaacaaacagaatgaggaggaagtgatactgtgtgacttccaaggctaggtcataaaaaattatgcaggtcttgagatgcttactcttggaagtcagccaccatgctataaggaagcccaagccacataaagaagacacataggtgttctggctgacagccccagctgagatctagccaagagccagcatccagacatatgagtgagaaagccactcagctgcctccagccccagccactatctgatggctaatgcattacagatcctgagtaagaactggccagttgagcccatcaactcccagaaccacgagaagaaacaataatcaactattgttgttttacgccactaagtatggatgactgttacacagcaatagctggaacaaatgcttctggctaatttgccctttacagtaatcactccagtcgtcttatcttccatagagaaatagttctgcttatgctggagctaagggctggctcccttcaaccagattactctctacaacataggacaaaaatgaatataagtgcaatggactctgtaggcctcagagctgctgggttcacctcttagagggtaaaaggagagccatggtcttagtaaagtccccagaacagctaaagttcagtggccactgagaatcctacgtaggcactgaaagaacataataagcgtatatgatatcagcacagtccccaacttgccctttgactagaaaaggcccctctcctgccataccagctaaaggttcaacatctaactccttatttgtatttactcttcatctataattgcctggccaacatggtgaaaccctgtctctacaaaaaacacaaaaatcagttaggtgtggtagtccgtgcctgcagtcccacctacttgggagactgagatgggaggatggcttgagtccaggaggtggaggttgcagtgaacagagattgtgtcactgcactctagcctgggcaacagagcgagaccctgtcttaaaaagaaaaaaatagagaaaaataaaatctcacaatccccaaactaaaggtgaaagcagagcaagcaagacaaaagggacatataatgaaggaggacagtgggtggaaagtggctgtgcaaagcactgacagggcctcccaacttgtttccgaagctacaaacaggccctgttgctcatgaagccaactccaatatcctggagaggcatttcccaccagactcccacaaccaaacatctctcagcacacttagataggcacccaccactgagctggtgatttattgcaacactctcccttcactcctctctggggactctcagagtaggcattacatctgcccacttgtcagctatttcattcatgtaacaattatatcatgcttcaaagaaaaaaaaatcttttattttagaaagtatgtaatatgagatggccacagagtaacaaatgtgtctggtctaaaaagtgatattgtcaaatagtttagactccgcatcctaagagtttgataaacctttataaaattagccagagagacatggcaaactcagggaatggaagttgcagttctggtactagttgtgtgagcagggactagaacgtgttgattaagatcttatgcctggatcttctctcaaactaatggggtctggggtttgtaggcctctaataaggcaaagaagcagccaattaggaaaagaagtgaacgaacatctgggctgtcattctcccaaatggtctaacaccacttagccttatttagtaagtacttctccatcactccaacaataaggatgttgcttatcttgcaacaatttcaacaggcttcttcatacattcacagacatgtggaattcctaaatttgccccaatcacaaaattgtcccaatcatctttaggttgcaactccctgaagtggaaactccaattacatataactcacagtataatttttttttgtattgagacagtctcgctctgtcaccaggctggaatgcagtggtgcgatctcggctcactgcaacctccacctcccgggttcaagtgattctcctgcttcagcctcccgagtagctgggactacaggcatgcaccaccacgcccagctaatttttgtatttttagtagagatggggtttcactatggccaggatggtctcaatctcttcacctatgatccgctcgccttggcctcccaaagtcctgggattacaggcatgagccaccgtgcccggctgattcctttttttttttttttttaaacaaacaaacaaacatgctggtactgccttcaaactaccctgattgcttctctttcagacagctgaggcccaatctaggccacaataataagaattgtcagcaagttaaatcaaataagtaaaccatgggcaaatccacatagtaaatggactatggaacaaagaaaatatatctatgtatcttctttctcccatcctgctttttggaacaagtctctttgctcgggtcacattaaagcaagatgaccatatatttcaatttatccaggacaggaccccttttactttcaaaagacttctgatgtggatgatacattatagattaccttacataaaagcaaattcaaaccagccaaagaggtaaatagaactttttgatgctgactaatgggcccctcatccaacaggcattttatatctttccacttttactcatgattgcttcttgaattaaataagtggttcttccctccttaccaccagtacttatttaatcctacttttcttcagctcaagcaccccctccttctggaagccttctaagtgtactctaatctccacaggtccctcctttctttaaagttctagcacatgatttggtgcctctatggtcttaacactattttcaagttgttttcatatgtgtaggtcttcctgcaaaagttgtaagttattcaagggaaaagcctgtgtctaatcacttcctttatgtgccttaaagaatctaactctaggccgggtgtggtggctcacacctgtaatcccagcactttgggaggctgaggcaggcggatcatgaggtcaggagattgagaccatcctggctaacatggtaaaaccctgtctctactaaaaaatacaaaaaatcagccag

SEQ ID NO: 3167 - DNA, 1812 bp, Homo sapiens
gcatgatcttggctcactgcaacctccacctccagggttcaggcaattctcttgcctcagcctcccaagtagctgggattacagatgtgcaccaccacacctggctaatttttgtattgtaaagacggggttttgctgtgttggtcaggctgatttcaaactcctgacctcaagtgagccacctgcctcggcctcccaaagtgctaggattataggtgtgagccactgcgccttgccaattttattgtttttgagggaaaaatccatgatttttacaaatgtccccaacttgatctaaatcctcctttcttttacaacctctcctagagatgatgctctaatgacaaaagcagagaggtaggcaaaggttttttatgattccctctagaaattttgtttagaaaagggtacgtcatctgtccaggattagtaaaataaattatgtaggctgggcgaggtggtttatgcctgtaatcccaggactttgggaggcccaggtgggtggatcacctgaggtcaggagttcaagaccagcctggccaacatgatgaaacccagtctctacaaaaatacaaaaattagctgggcatgatggtgggtgcctgtaatcccagctactctggaggctgagatgagagaattgtttaaatccaggaggtggaggttgcagtgagccaagatcacgccattgcattccagcctgggcaactgagcgagactgtcttaaaagaaagaaagaaagaaagaaagaaagaaagaaagaaattaaaaataaataaataaatcatgtagactaatccacttctggaagaagaggaaaggtgtacttgagttaattcctgctgtgtaataagattctatattgaattctcaatgagaatatcagcctggatccctccccacaaaatgcagactctccacacctgtgctgtgcattcttgaaggtgaactagtctcatacacacactttgctgacgagaagctccaagcccagtaggtgaagagactccctttgggtaccagggggagcagagtcacgacaagcagctaggcctctggacttgctggagccttcttgccagggaacagcaaactcccacctgccagctgagaatggttttatatttttaaacgatcataaagaatatgagccaccataccccagcaaggtatattttaatccccagaaatccatggagctagaaatgctcctcaaagagatccatataatcacgtggctcagcagcacaaacagcctctcatctctggaatcacagtctaaaagattttgataattaaccttcgttttctactttgagaaagaaactcacccaaattcaaacaggtaaacagtcatgtcaatttgcaggtgagttttcaaaagctgatctggaggcattgttctgtgaaaataaattaaatagaacaaaggctaggcaaacaagtcatcgttattttcttcacaaggccatggttttcagtggtagtttttcattgacttagtagagtaggctgatatccatataaatgtaactctaaaacctccctgccactctcacgttatagcacagtcagggcatctaggcaagccacggagaattccaggtctggggcattcccaagaggccaggtctgtgaacacattctggacacctggcttagctgacctccacatcaatcctgttgtgagagtttcttcatcttcatcatctgaagtctctctaatgggttgggagagagggctcagcctctgcatcccctattctcccatgtggcatctcagcacgtgtccctcctgccctccagatcatc

SEQ ID NO: 3168 - DNA, 3113 bp, Homo sapiens
ggacagttttctggatttctctactactaacttgtctgcactgagcgtgactcacccctaacctggtgggagcgctgattggaggggcgggaggctggcggcgtgagctccagatggtgcatgtgcccttgggcttggcatgcggcgtgtcttcgtgtgaaggacctctgggagcagcgagagggctgagctgagctgagctgagctgcatgtggaggggccctcccgggaggcctgtgccctgaggctgaacttttaacaaaaccctgggaccagagggcttcagggctgatcaggacctgcagcgcttcctgctgggaagcaggaagcaatagaaagtttacgctttctattgctcaggagccgctcagtgattaaaacaagtctaaaaagccaaggggactccgtggccccaccactcccaggctggaaggcaggttcttgctttgtcagcccttcctcagcccttgtccataggcagaaggggtttttattaatacatgattgtagccttgtaggagatgagattatgtgtcttgctttgaaaattctacacaaaagcctgtttcctagttgctacagcagccctcaaactgcccatttctaaagctttcaagtagcccagtgatgcaattggaaagcccaaggcccagtttttcaggctaccacaccccatgcgtggaggctgctgggaggtctgtggtaactccatgagcctcagtcccttcctccctgccccatgggctcagaggcccagcacccctgggtgctgagagggcagggtgcccttcacaagtgggcagtgtccgggcagtcctgtcaggatgtggggtcagtcgtaggaatgccggcaccccttggctgctgagtccttagactcctgggggccactaggtgggaactgggttctacctgacagcagctgcccccagccgcagtgctagccttgggctgagtcttctgtgctagatctctcctgggcccctccttccttcttactcaagtccaaccccagatattttcagttgccgtgattctgaggatctgatgcccctggaaaggtacaacagtccccagcacccactagctggcccaggccccaaactgccaggagtggccttcttgagaccatgtgtcaccctcccagggaacaagagctcgtggctgtctgataagccaggcctgtgtgactcctcaggacatgcacccccaggtccctgtacagctgagcacaatagctcaggagtgcagggccatgatgcctgtgtctgtcttctctcctgggccacagccaccccacgtcatgctgcagcgccgcagagatcatggctgtcctctttttccacaccatgcgctacaagtcccaggacccccggaatccgcacaatgaccgctttgtgctctccaaggtgccttctccctgctcgtcctggcctctccctcagtgtcctgctctgtgctgacccagctggctaaggaatacaggactgaattgatgggttgctctgccatggagcccagggccatgcagctcccatcctctacgcggtctgggctgaagctggtttcctggccgaggcggagctgctgaacctgaggaagatcagctccgacttggacgggcacccggtcccgaaacaagctttcaccgacgtggccactggctccctgggccagggcctcggggccgcttgtgggatggcctacaccggcaaatacttcgacaaggccaggtaacacacctactccccacccccaacctgggtagttttggggagtggtccttgggtgacccacccttcaccatcgcccccagactcttcctctttcctggctagggcagagtaatacatatgcgtggcctcttttgctctttaaacatccgctatggctggtgccatgaccggccccctttacaaatgaggaaacactcaggagttaagggacctgccctgggtccctcagcagtgactggcagggccaggtttgcacagagtgcgtgctctcaatcatgtgctcttcagccagagtgcttaggctgaggacttcctgttttgcccccagccctgtgcccagaccccagaagtctcagaaagacccacccccaggcccctgtctgactaggcaccaggagcccaggcctgagccacttgcctttatcttggtaaaggggagggttgtatgttctgaggggttctgggatacctgtaagccacctcctatcagcagggaagaaacaaacatttgagagattgagccttcagagggtgggtgatgagcctgaccagaaaggtgtgctgctctagcgcccaccaggtgatttgtaggaacggccccccaggaaggttctagccataagtttgtctgcggtggtcagatatggcctggggggatgaggttgtaaactgttaagaataatggctggctgagggaaggattgcttgaggccaggagttccagaccagcctaggcaacagagcaagactctctctacaaaaaatacaaaacttagccaggcatggtggtacacacctgtagtcccagctacataggaggctgaggtgggaggatcacttgagcctagggcttcaagattatagctatacatgattgagccactgcaccctagcctgggctacagagcgagactctgcctctttaaaaaaaaaattattcttttttttaaagaataatcactgtattagtctgtttccacactgctgataaaggcatacccaagtctggggaagaaaaagaggtctaatggacttacagttccacatggctagggaggcctcacagtcatgctggaaggtaaggaggaacaagtcacatcttatgtggaaggcgcaggcaaagagagagtttgtgcagggaaactcccgtttttaaaaccatcagatcttgtgagacttattcaccatcacgagaacagcatggggaagacctgtccccatgattcagttatctcctgctgggcccctcccacaaccagtaggaattacgggagctacaaggtaagatttgggtggggacccagagcctaaccatgtcagtcactcatcagaagggttcctttgccctttgggggctaggccctgtgctcagtgctc

SEQ ID NO: 3169 - DNA, 626 bp, Homo sapiens
cactttgcctgggtgtcttgcgttctgcacattccggaggaccagcttcctcatcagaagtctgactccatggaaaccagatggggcaacggggtggttctagtgcagactgtagctgcagctcctctccacctctagcctgctcatttccagctcagaaattctactaatggcgttttttcttcctgaaaaaggaaatgaacagggtccctgctgattctccaaatatgtgtctaatctgtttactgagttccatagcacttggagccatccatgcaaaaatctgtagaagagcattccaggaagagggaagagcaaatgcaaagacgggcgtgagagcttggtgcatacagccatgggccaaataaagtttccttggaatagccatgcctgttctttcacatgtcatctgtggctactttcacacttgcatgaccctgagagtgactgattgccttaaactttgtttcttttatggcctcactagtgtagccaatcgctgccgcacaacagcacagcagacacggtatcaggcaaaacctaaaatatgtggtccattacagaaaaaatttgctgacccctgggcttgcttatttgtttatttatgaagtgagattaggagccat

SEQ ID NO: 3170 - DNA, 5686 bp, Homo sapiens
gcctgtcagcatttcactgtgaataatcatacccatgcctctgctgacatgaaatgccaagcgttagtgctttggttctcagacagctttaagtctaagaatgaaagttttaattgaagaatgtgctacaaaatgctctacttgctgcggcgatgctattataaggtacagggttttttttgtttgtttgtttgtctctctctagaactggaagctactcctgtacttaaggccaggattttagaaaggagccatgagaagaatgattcagactaaaggtgagaaggtaaagaaagcaagagtttatttaacagctcttctttttttttcctcttttttatttcttccctcaaaaatatgttctcttggtgatattttagtttgtgttatccagagacctacaacaatctgatgaaaatttgtagaaactagagaaaataatgacgaataggtcaacacccacccttaaattcacatagaaagtaaatgatttaggaaaaatagttgcaactgctatcatatataaggtcttcatcacatgaataaactcttagaacttgatttaaaaaatatcaacaatccaatagaaatatgggcaacaaacatgaacaaacattcctttaatacaaataaatataaatgttaagatgttcaatctcattcataaaaagaatagtgcaaattatagttgcactgagatactctttctcaccaatcatcagattggcaaaaatctcaaagactagcaacacattctgtttgtgaagatgtgggggaacaatctcgtcaattgctgatgtgatgacagtgcaaaatggtccctagaaagggtgtatttgttttctgttgccgctgtaataaatgaccacaacttcagaggcttgaaacaagaccaacttataatcttgtagttctgtgtatcaaaagtccaacacaggtcttgctgggcagggctgctttcctcactggagactccagaggagaattcatttctttgaagttacaggacaatgcccttgttttctcactcatccaggttgttggcagaattctgtgtgctgtggctatcagctgagagccattcctagcctcccaaggcggcctgaattctttggctcataacctacttcttccatcttcaaagatagcaaaggcagactgaatctttttcaaaacatatcgctcaacaactcttctggcttcttacactttaaagcactcatgtaattagactgggcccagataatccaagatgacttcctcatttcaaaatcctgaattgtaatcacatgtttaaagcatcctttgccatggaaggtaatatattcacaggttccaaggattaggttctggacatctttgaggggatgttattctgcctaccacagatggcaatctgtcagtacctaccttattacaaatattaaattggtggaattacttttgcaccaacctaatatgtttatccttaactcagtaatctcacttttggaaatttattctacatatataggtttgcacaaacaaaatggcctatgtactaatttattctttgtagtatagcttgtcatacaaaagaatagaaaaatcccaagtatctaccagttaggcactgattaaactatggtatatcctcttaatgcagacctaaaatagtatgaataaactttgtattgttatagaaagatctctagaaaaagcaaatttatataaaatatatttcgtatgctacttttagttagtgaactgaatattcatagccttgtaaaaaattgcctaacctaaatcttcatatattcactatatactgtatttatagttgtttatccataatgacagtccatatacaaatttatatacacatatacagtctatatacatatattatagagagagagactgtatttatatctatcaacaaacaaaagagcataataagctaattaaagtgtgattccctgtaaggaataaataggcataaaaagctggagcatgtcaagggtgggaatgtgatttctcaataaaccactctaatattttgacatttgtaacctgtgattgaattacttatactgaaatacgacattaaattaaaaactcaatgagtaaagaaccaattttcaagaaagccactggaattgagggaatggatgttgttctgcaccagagtagctttatattttccttatgcattaagcagcatcttgggtaagttaatggagggcaggcatactagttgacatgggagtttgttttatattatagttaggaaaaaatgatcaaatgtaaaataatcagcaataagacttttttgtagcattgggaataatgtgagttaaaaatcaaatatatttgcacagtaaatgtgtttgaatgtctactgagagtttttcttcttttctaacattccctgtacttttcagttactatgaattccatttgaataagaggttaaatgtcattaattacaaatttaacatttcagcctagcatgagctttctagtctccacagagtataagaaaagaagatgaactgaagaaccatggcttggtactcagagccagtattgaggccatgtgaggcagtgggattgtactcaatgggtttggactcaaatgaagacagcatcttacctgctttcatgcctccctataaagagtgattttactcacactgagaccaggtaaaggtaaacaaaggaaagaacaagcattcaaaggacagagcctacaggaggaatatcctgatgcttctgctgcttggctctcctagcacatcccagtgtgccttttaaaagtgaagtccaaaaatgagagaaagacagagagagagagagagagagagagagattacacaagaacaaggaagaggagaataactactttgcagtgaagagcacaccctacaaaaccaaaatgactcccataggaagaagaagcaaagagaaaatcacatggtcatttgcagtttgatttatggtttacaacacatcacctatgactacttactgacttctttatagattgattgcaaaaccaaccctgtgagtagaaggaacaaaatttcctatcaaagattctgcttagcatcagcatggattcatttttaagtcagaaaagcatcctttctcaccaccttacaaattttggccaaccatcatcctcaaataatctctttttcacatactacctcttcatactgagatcacatcccccaaatcccagcagagaccttcagacagtgcagtggaaaacaaacagctcaaaaattagatttgggttcatattccacaccttcatttaacacctgggtgtcttcagataggtgccttatctctagatcttcagcaactttatcagtgagaagtcttcttgccctccagaactgtctgggggacttgaagagacagcaagtgcaaaacgcctgtggttgacattcaagaaagatcccttgccttggcttctggtcttgggactcaaaaaaaattcacatggacatagcaaaaaaaaaagaacccatttttaagaagtacttgctactacaaaaataaatttaccagagattacttcaaagcaagaaattacattaatgcattcttagccaggaaagacattatttcaccccacaacctcaagttttctaaaatccaaatttgcattggtagcttggcaaagcctgtgttgatatcctaggcagcacctgagaggatctcatgagtggatcaattcttcttctagagaagacaagcattcatagggaagccctacttatgtaaacataagcagaaatttctctaagatcttaaataaggtccttgtgtaatctacccatgattacctatatacacacttaaacacataaaaactttttttgtataagcctgtgatgatgtggctcaaaaaataaatacttgtttgaaatcctatcattttacttagactcaaatttatgaatcttattgggattccaaattagacattagagtgtaaagatactgttcacacagtaatgaaaaaatggtcaagttgggctcagtatatagatcttcttggacctcattataggagatgaaactagaaattggacttggaattggaactggggggtggtggaggtggtaagagacgagctacgcttgatgtaaacaatgctttttcactcgattttattctttggggaaacacacagataaacctcattaagtcaatatgggtctagtaaaaatggcccccaattctaaatagctctgattcctcagccaaatagatgctcccttattatttaattaaagcatcagataactcaaactggttcagatagtggtgatccatgctttcatattggtgaggttttccctattgtcttgaattggagtttcaaaacacaatagtgaaacagaataccaaacagtatagaccctacctgctcagaatgtccatcagtttacacacatgtacacgcacacacaggtacatgcacaaagaaacataaacacacactgatattgcttgagattgcttctcaagtgaatgaaataaccaataggtaaagctcaaaatgtcaaacataagtagagaaagccaagcaaatgaagatctattccaattgtacccttcaggaagccaaagagaaataaaacgctttcatgcagtttgtgaaaatgggaaagagaaactaattcttttactagaagcccaaaagttaaaatatgcaactgcaacttaattctgaatcaatcatgggacaaattcacttttatgatgtttgaggtagatttcacactgtaaatcacactaaaacctaccctcccaaactgcagcacactcaggaacttatccatcttgaaattagattaaagactttttgttacatcattgagtctatttggaacaaaagttttgtgaactcaggaaggtcagaaagaaacaggaattacagcaaacaaaggaaagcttgggtgaacttttctgaactttagaggtatttcaatttggttcataatgaccctcgagaaagaagatcaaatacatttttatttgcttcttcatcaagaccacaaataggtcttcacagcgcaaagcaaggcccaagtgcatgtgattcagaaatgatgtacttgtgtgggtagccagctctgtgcctggactgcagcaggcatgcaacaaaggtgtttgaatggagtgtaacttttatccagatgacccacagttctaggtctcttttctgcctttaagtaactgcagataactggtttcaatatatataaaaaaaaatctgtaacactgctttactctgtttttttatttgttctcttccgatttataaggcagcaaatgtttgaggactagtaccaggcattatgctgtatgtgggagatacatgatgcataagatgagtttccaacctcaagaaatgcaccaactatcagaagagctcacaaagtttgttttcaagtgctaaattatagaagtgagactgatccttgcaaagctttggtaggacacttcacacaaatgttgcttctctgcagcatactgacggatgaaacacctgaaaaatctggcttaatctcttttttttttctgtagacaacttaatgcaacaatttaacggtaacatagtagaaaaattccaaacacattatctagtgaataaaagaaacaaatatgctactgcaataaaag

SEQ ID NO: 3171 - DNA, 9299 bp, Homo sapiens
gtataatttaaaaaaaaaaaaagcagtggtagcaaataaagcaaattgagtgttattgccaggacatgtgttacaggctaccccccccccccccccccgaattcagacctcctgtggtaatgaatgggtgtaattgaagctgtaagattacgcaaaggagacaacagaagaaaaaatttttaatcatgatttatcttttacagccaaaaaagagcataagatggaagaaagtcacttggagaatgcacagaaaagttttgaaacaacagtacgatattttgggatgaagccaaagtctggtgagaaggagatcacacccagctacgtgtttatggtgtggtatgagttctgcagtgacttcaagacaatttggaaacgggagagtaaaaacatatctaaagaaagattgaaaatggctcaggaatcagtcagcaagttgacttcagagaagaaagtggagacaaagaaaatcaatcccactgctagcctgaaagaaagactgcgtcagaaggaagccagtgtgaccactaactaagatgaagacacatggaaatgatggcactggaggtggaggaccttgcacgcatactctttgtgaccacagggttgcaggacgttcttgaaagatgtgtcactaaatgtttgtttttgctcatctctttctgaggtcatctgcagagagtgccccatgccttctttaagaagtccctcattaagccgcaggaacaatggaaaactatttaagggaacattgcagaaatatttgatgactgtttcttgtggaagcccaaagtccactctaagagcagaagaaataccaaaatgtttccaaaatttttttaaaagctgagatttccagctttataaccaaagcttgatatatgtcacattgtcacagaagagagaaaagatcattgaggacagttgccttgggagagttcaagtctttgtcgttacacactgctgttttgattattggtcttagttttgatcctgttgcagcaaaatcctgcagcatctttctctccaataatgttgcaactcaccaaaactattcttgaagaggtccaagaacatgtattatccagactaaaaaaatgattttttgttgttatggtttacgtgatgaaaaggagaaaaaacagaatcatacctgggtggagagagggagacaaatagccataaacttcatcctggagaacaagttaccatgcaaggagttgacatcagttgttaagtgaggcccattcttgtttttacatcggtcctttgtggtttttctgggccagcagagattctgcaccccaactcccaggagaaaatgtaatacctgagcaagcacagccttgggtgtgcttggacaagagacccagcggcagagcaccttttacattttggaccgttcatgaatgggcaatgttgtgttgatacgcagccgagttctacgttatgtgctgtgactgtgcagctggacgacccccatccccaggaggcagtttccagacaggagagcaaatgcaactcacagcacctgctcatgaccttggctgataggcatgtgaagtaggatgaagcaggactctttaatgtcaaaaaaactgaagggcagaaaaaaggttccttacatcaaaatgaaagtaattacattaatagaaaacttccaagtggaatattgttcacaggcagctctttctgaccctggctcttgagtcacataaggaaaccacctttgacctctctgacacttttgtctttaagccacgtctctgaaatcttgtgaggggtgaagaaagaggactggagatgaatggacaatatgatcaaagactcatttttaggccttgaagaggccgagctttctccccccaattggtggaggacagtccagagatgagcagaaatcttaaattccttcctgatccagcctccacatgtggcctgccccttgccccagcatctttccagaacccctggacttgccaggtgcctgagcatcttcccaggatatgcctgccagccagcagcccctcaggaatgcttctataatagatccagtaatgaaagcagcaccatatcctaatctaatgtcagcttcgagaatgaagactgcagtcaggatcaaatcaagtcacagaagccatattcatgcaggtgctaaccgccttttctactggtgcaactgaaaggaatatggtaacatggttggatttttaaaattcacaatgaaggaacgagacaagcaaaacagaaaagccgagaaggaacatgcatgactaaaaaggcttgaagttgcttgtgagcaagaagctttttatgctgctttcttacatagtttctcttcattttcacttaactctgaagacaaccaaaagaacggatcaattaaaaactgattccacttataaccattgtatgctccttctagtgttatcatgcacaagaaaagtgccagttttacccatgccatataattcagctcttttgagttatgtggggccagcagaagtctcaatccttataggcttgatggtgagagcagcgggaggtttgaggtgtactcattgcagtccactttggtctgtaagtaggatgcttacgagaaatcagtgaaggtaagcagggctgccactgtggccacgtaacccttcaggaaccagtgctgaagaataatgagtgagaacacttaatttgagagttagacaaatacagcccactttggatttcatcctagtgaacagactaaaactttgcagtaaaatacctatttctacaaagcaaggtttgcctgcctcggttggggaaacctagtggttttgtcacactagtcgatgtatgatgttagtgttgtaagacaccatggcagaatcttcattattctcacctattctgaaccctgcatcatgtatctgggatgccccctcccaagtccaccaatgtaccacgttgctgacacagccttcatttttaactcaaattgatgctcagtaaaggtcaatgacaatttgttcaaggaagttcatctaaaataatctggaggccttgaaaatgatccctctaaaatgctgttgagcttgtgttcagtgtagcaggaggatctgaacttttcctggagaggaggtgatcgggatgccatttggcagcttaagcacatcctgccagcaggctttaagtggctgttctaggcatagccctccctgaactagaaaggagagtaaccagtttgctatgctgcatctaaccagacacacctgacttagtagtaactctaagaacccttaacttacaaacaactttgtctcctcttagacaatattcattaaatctgaggacacagtttgacagtagttcagattcttgcatgagcaattgacagcatcagagcacacaatatcataagttacataaattacacaaagtacatcataaattacactacagacacgttaggtaaaaagcatcaggcccgggccgggcgtggtggctcatgcctataatcccagcactttgggaggccaagcgggggcggatcacgaggtcaggagattgagaccatcctggctaacacggtgaaaccccatctctactaaaaatacaaaaaattagccgggcgtggtggtgggcgcctgtagtcccagctactcgggaggctgaggcaggagaatggcgtgaacccaggaggtggagcttgcagctagccgagatagcaccactgcactccagcctgggcgacagtgagactccgtttcaaaaaaaaaagcatcaggcccatgaagtatcaaaaaccaggttaggaggtgtgctgtatggcttttatctcaataagtggcagcttactggggaaaaagaaataagaaaaagtgtggccaagcagaagtggatgtttatgatgacggtgggggcccagaggtcataggtgatggtcctactgcccaacagttgccttttgaatccttatgttgatgatggtgtctttctacacactcactgcaactactcaggaattataaagattttctgaaatctgagaagtggaataaggaaacccagtggagctattacacttttaaatgttctagccaaaacaaattgccagtatggttgaggaattgaatatcagatggcatgcagtctcccctcccctcccctatcaaggacagtagaagctgcaaacctcttctcagcctccttcaggcacctcctgttttcataagcaccatgaagaatggtgtttcctaaatgaaaagttcagatactgctggtaaagaaactggaaaaactgaaggaaggaataaaatatgttggtggtattaacacctccagtaagataagtcattggtacggtttttctaagggccgcagtgagatgtagcagaagaaatatgtttattttgggcaaagatttgcttattggcctgggattgcacattttctctatgatgtttgcaacagagaaattttcattttaatgatactcttcctttcttgaaagttacatgtcctcatttctgtttctgcttctcccttggccagtgtcattgatgcagatcattgcatacaacagcacagcaaattgcgccaagtcagtgtgtgaatgggaattagcaatgcacgcttgcaggctctttttccaggaaccaggctgtaacattgaccggggaacctcttcattccctgacatactaaattggtcaattttgtagtactcatctccatccacaaaaacaacaaagataaaatcaatttggagctttatatgacaaaaaggaagaagtccaaaaatatatagccttcccccctcccacatatctgatccaaatattaaatatctgattttataaaacagtttaaattgtctttttaaattgctaacaagcatcagttatatttgagcttcatttttcttttatcctgtctgtcctaataaaaacaaaaatggccaaaaagtggagaggaaagaaaaagcttccactttttaaaatttgttttgtattagttattttacctttagggaccctacaactgaagagagtggagagaataaagaagtgaactttcattcatgtctgctactttgacctcataaagaaatctgcaacacagatgaaaccagtctgtgtggccaagctgatgggatttgaaaagagtggataatttttagcctttccaaaatgcaaataacttggatatatttccattttccagctatagagagaaacaatccagctgcctggaaactgttattagtatagaagtggcttaaagaaaagcatcttcaaatacttgacttagcatatctttcttctttagacttacataatgatattcatctctccattagcaattgaatccaggcataaccgggctcagttacacagcttgtctgtgactgggaagcccattttgtgtcatttctgcacacctgtccgctgttgacaccttattagaggcactgcattttggtttcacaattcttcatctcccttcccaaggaatgggcaatctactgaacttccagatcaatgctttgttggaaagtgatgaatttaagagagttttaacatgtcaaatttgaagccaattcagtatccttatttgttccaagactcttaaccaatactgtgatataaagttaggatttgggaaacgtgtagttaacaacttggaaacatgaagatattaaaatggcagctggctaactgtctcttaagccactatgcaatttctaccaatggagagattagggaagcaaattaagcctcattcagtaggtctgctgtctggtggaacttacggaactcatttcctcctctatccccagcccttctcctaactatggtgataaccagggccatagaagaccttttctctcttacctttctctgataggatcgtgtccttcagtcaagagctcatgtgaactccagactttatattacatctctgaagttcttgatgtggggaagattgacttttattccatttttatatgaaggtgttagatatagccatcaatttatttttctacattccctctacgcttatgtaattttctatttttaaatcttctcttaaatatactgagaatctctagtctccttttctaaaggctgatccaactacacttgtgggctatttttccaagctttgtgtgaaacttgatgacattgggccagcaaaatgcaaagaagactatagtttcaggcagaaaatcacgtccaaagaatttggcatggattaaacaacctctaccacactatagctctcacataggctgaacattttcctaaattctacctgtgcagacactgaggggctctctacctttgaaactatgagaacgtcttaaattaatatgaatatttctctccatgtatagtgtgagctgccaatgcattatcttaatacatcaagaaggaaatcagatttcaggcacacattagcaattgtttgttaatgtccttggcaaacgtgtacctgctttccttcattgttctcttcaggggctttcttccactttcctcttatgaaacgaatgtgtttttgactgttaactgggttcgctttccagatctgtctttcccaaatgaaaggttagtcccatagaccactggctattcagggaaattactctctacctccccatgacatggatgataagtgttgagggatgaacactctggaaactcttagcatggattttgaattccagatttctttataggagatgtataaaaaggagtttatagcatacaaaaattatactgctcttcccagtaagggactaaaaggacatttgaaatctttacattttagatgtttttgtgaattataaatatctcctttttcctcgcttcatgctaacttgtctctagataaaatcttatttcttcatacattggaccacaaggcataaagaaggtagctcagcgccactgagattgtgttctgcataatatttggaaggcttccatttccattgaaaacaaatccatgagtgagagggaaagtctagtatcaattcttctgtttgctcgcaatgacacaaataggttttggggatctacctaagggataggtctactccaaaattattaaatttataattgtgcaattctgtaatttcccaaggcataagtaatatgaccctactgtcagctagatgtcttatcttcaaagagagtatgcattaataaaaagaacttccctttaaagaaccaatctaaaatactaaaaaggcagaaacttttaaaattagaaattggataatttttaagaatctttagagaaaacattggtttatcatagtctttttctttcattgagttttcatttagactagcatggcaagcagggtggccttggactttgatttaggggatcgtgctttggcctggaaaataagcactggcctgcatgcctagaacctgagtgaaggcagtcaacatcctagtatgaatcagacctagcagaaatgtaaattatttcaagtacttcagggtttagttttcttagtgacaccctggaccctggatgctgctttctaaagtgcacctgatccatgcagttttatgtcttcatataactggtatcttgtgagtttgcaagcaatgggatgagcaagaaaaaaaggacgcatggaggagaaaaatttgaacgaggctagtgcaatgttttgctgatagattacattgttagggagctggtgattttttgccatggtcgtatcgtggacagcttttccgtggaaattcaaggcatctgtattaggcaaatgtgagtgcccttgatcttgtattgatcagtgccaatgtactgggaaagcaggtaccccagtgaaactggtctgtgcttggtttaacagctccaacaatttcagatccatggggctgcttgaccatagaccctgtttactccatgcctgttcaaaagtcattttgacttctagctttgtttcactttcttctttcaatacttctgtttcctcgtccttttccttcatattccatggctatttctttcctactttacagtttcccccagacccagattttttcacacctctgcatcatagacaactgagtagctcccttggcccctcctccatcctctcacaccctgtgctccgttcctcagccgtttggacagggagctccgctgtcaccaaggagcccatgtgagacacactgctgtgactgcctcttgttaatgtcagcatcacctcatcacttaagcaaaaaggaaaatccataaaagagatggaaaatacgtctctttttattttattttaagaagattgggcggggtggggggggggttcttattctaggccttctcaatttctcatagattttaccttaaactaattaaggccattctcttgataaatttgtacatcagaccgggtcaccagctatgatgcagaacgccagatttttgaatctcaagtaactttctgtggtgctggacaaattgacttaattctgtgcaggcaaacactttgaatcataaggatttttattgccgctccattcttactactattcatgattcaaacatctacccctgttctgaatcaggatgttgacacttcttggttattttcagatgaacagtaactgctacactcttgaaagcacttaaaagtgcaagcatgtcctaaatagccatttaacctggtaaaacataggcttttctgtttaattaagtattagaccagtctgtagatataatctgaaaagattgtaggcagtaatgaagacagttggggaaaggagaaggccctttaaagacatgaaaccttacacgctcttgggatatttttaagcataataagctcattggattcaggtatttttccctttgcatttttaaaaatacgtatttctaatttgtttgcatatttaattttgtcaaagctgagaaatgctcatgagttgaatttataaatgtcatttgcaaccaaatgaagtatttatttttaaaaagagagtgaaggaaccaacactgatttgtacataataaaaatgtgtgtattatatatatatattttttcctccttgacagtacttggtcacaatatcaagtgtatttttgtacataatatatattgattagaaaaacgtcaattgtctattcaaaaaattctatctctgtgatagattatatttatcctaatctgttgatacctctgttaatttgttttaagagaattatattttttggaatttacagagaattgcattcatggctttcaattgtaaatatgctaagggtattttaataaatcttggtttcatgtc

SEQ ID NO: 3172 - DNA, 19563 bp, Homo sapiens
gtggggtgaccataggaacatcgtcacccctactctgaacgcttactcaagacaaggtcaggcaggttctcttgaaggaggtccgaacagcatttctgtggcttacagattaggaaactgaggcagagaggtccaagtgttttggtggctgctgttgtgaggaggcatacatgagcctttgaaagattctgagatcatggaacaaaaggtttttgtctcttagatccagatttcaaataattcacagtcttttcattgttgatgtggcctggttaatgtcactactcattctgattgtcaactttcattcctgaaaggctgctgggtgacagcaggaatgcctctgcactgttggccctgtgggcattggataagcctgggtgctggggcaggcgccaggccaggtcctgggtggcctctgtagtgaaatgcagccctggttacctccagcctccatctctcctggggagattaacattattgaatctctacaacatcctagaacaccctagacaggaggtcttttttttttttttttttttttttgagacagggtctcactctgtcatccaggctggaatgcagtggcaaaatcatggctcactgcggccttgaacccccgggatcaagcaatcctccagcctcagcctcccaggtagctggatcagcagatgcgcaccaccgtgatcagctaattttcttcattttttttgtagagttgaggtctcactaagttgcccaggctggtctggaactcctggactcgagcaatccccccgccttggcctcccaaagtgctgggcttacagacatgagccaccgtgtccagctgacaggaggtcttaacatccttgtttttcggacgaggaaactgaggcgtggagaggtggagacttacacaagatcatagagcgaatagagggcagagctggagtctgaagtcagtctgaccgaccatgaaactcacatgtcatcctgacaccattccaatcctgtgaggtccccctgcttctggtaggcagctgcagaaggtgaagatgcagcactgaggaggcaggaggagggctgaccaccagctcccggcatgtccccagcaccaagtggcccagagagagcccaggatgcgcacgcaggtggatgctccgcgtgctgccctagcgggtgcctcaggaccctttgacatttcagtaccagaaatcaaatgtcgcttcagaagcccggccctccaaagatgtcacaatccaacctcccacacgcacaggagaacagcgcgtttggagggatgaagtaactcaccaaggtcacgcagtcctgcagagccaggatcccaacccaggaagtcctcagagccggccctcgccaccgactccctggagataggtctggaaacttgaatctctggaatatgcaaaatgcccccttcaccaccaagaaaggaccatcctggtccctgatccccgggggcacaacactgctgtgtgacaggggcatgacagctcccatgaaggagtccagaaccgagacctgtggagagaacatgagatgcccaaggtcacgagagagtgatgatggaaaacccttgaaggaaggacacttttcctacatgtgactactcattcatcacccaggctcatccagcagacctcatctgcaccaggcataaggacacaagggaactcatgaagcatgcctctgcccttcgagaagccctaatctcaaggctcttggcccttcctgggatccttttgaagatctgatgaaaccctgaactctcttcccggaaacacaagcacatcaaatggtaaaaatatggggtaagtgtcaagaagccctgaaatcataatttaagaactgctggtttggtgagaaagagaagcaagttgattaggcaattttaatatcttttgctaaaggctattccaggaggcaccatcagcttatattgggggttcacagaaaataaagtgattgactcagtttgaggtgggacagggtgcttctagtaggtgggatcaaggaagatatttcagaagggctaactcttgaggaatgagtggaaatttatgaggcagtcaaagggaggcaaggaggaaggtgaaccagcatgaacaacatgcagaccaatgtgtttattggttgccaggagctgggaggagtcagggttttttttctggggcaagaaaaatgtactgtgactgggccgtgcgcagtggttcatgcctgtaatcccagcactttgggaggccagggtaggtggataccttgagcccaggagttcgagaccagcctgggtaacatggcccctgtctctacaaaaaatacaaaaattagctggatttggtggcatgcgcctgtggttccagctactcgaggggctgaggtgggaggattgcttgaactgaggaggtggaggttatagtgagttgagatcacttcactgcactccagcctgggtgacacagccagaccctgtcttaaaaaaaaaaaaaaaaaagttccgtgactatatcgtgatgatgatgaccttgtgaacatgctaaaaacatggaattgtgcactttagaagggttcattttatgctacggtatgtgaattgtgtcggttaattttgcgtgtcaacttgcctaggccatagtacccagttgtttggtcaaacaccagtctagatgttgctgtgaaggcaattttttcaaagaaattaacatttaaagcaggagtctttgaagaaagtggattactctccataatatgggtaaacttcattgagtcagctgaaggccttcagggaaaaagactgaggtctctcccaggaagaaacaattctgcctgcaacttttccctaggcttcttgccctgccaattttgaatttcccttgactacttgccctgccgattttgaatttgccagcccctacaatcatgtaggccaattccttaaaggaaatctctttctctctctagatatatagatatgtctgtgtgtgtgcatgtgtgtaatatataataatgtgtataatatatatacacacacatcctgttggttctgtttctctggagaaccctgactaatacatgaattatacttcaacttagaaatgttcattaatgagggattaaataaattatagtgagaccataaaagacaagtacacaggcgtgtaccagtgtggtgtgctcagggtggcaggtacaggctggggaggaaagaaagctggctggggcaggcagggcccagacaatggctaaccttgactatcaagctgtggccctctcttgcctgcaggatagcaaatcttagttgggttatttttgattgcaaaaaccagaaactgactctggctgaagaagctatgagaagggtatggggctcacacacccagaaaatgcttaagaaccaaatccagaaactggcaggagccagggaaatcccagaaatcttggcagcaggaactcattacttggatttcttaaggataaatcagttgccaccactttttgttcttgattcctctggtcaaaatgcaggatctcaggaaagacaatgtgattggtcacatgtgagtccacgtgcccaacccttgcaccggagtgcaaggcagaaccccttgtttgaaatttctgccagttgggtggtgtctgcggctgctgctgggaaaatggggagtagaggcttgcaggtagatcagctggaatacatggcacaggtgacactggaatccctgacctgctaatgaatgaaaacagggcctgatgtccactgagttgagcaacagggcctttgttactgcaaggacgttgtccccacctccggctgtgttaggatcacagaacacctgtcaccagggaacagagctttttcgcaggtccctgatgtttgtagctgtgtgaccttagtcaacacgctcagcctctctgaaatgcaacatctgggggaaaaaatgaaagaaaaatgaagcaaaaagaagaagaagaagaaggaggaggaggaagaggagaaagcaaagtgatgaggtggagaatggacactctctctcccttctggccacaactcaattcccccaggctgtctaagtgcatcctacttctcctttgtcacattcatcagtcatcacgtcacactcattgtgaagtattctcattatcattgcgtcttgcatgccagtagactgaaagctccctgactgcagaatgaaccaacgaatgaacctatttgcacctatttgggaatctacttgcacctatttgggaatctacagatgctgcgtttttatcccatggaggtatttttgacaaccataaggaaggtgaagttcagagacaggcagccactaacttgcaggatacagctgtaaagatgagtgggggatttaaccaacccaaatgtgactgattgtagagttgtcccaaccatctggaaccttgcggccccacacagatcaccattgacatgcattacccaagttatggagtgattggtactctcttcttgcatgttaacccaatacaaccagccagatatccttaaagaaaaagaagcgagaggggctgtagcagacaggagatgtggtcttaaaatggagaggatggctaggtccactttaaggggatttagaaggtgactgcagatctgtgcaatatcccagtgatggtcactagagagtgcaggagttgcatctcctcctggggagggaatgttggctttcatctttttagtccaaaggtccccagcctgggatcaccctagggtgttcccaccaccctgggttcctcttgcctcatagttacctatgattttcaggcctggatgagaggcagggcgagtgagctccatggaaatacctgtctccacagcctgcaggtgcacacacgtactgcccaagctatccggctctgcgggccccagttccacttttgactccatctgtccttggaaacaaaagggaagaaaggctgtttcttccacctcatactttaatttaaaatttaggctatgttttctagggatgcatggaatctagtcatgacctatttgaaatactgaaagaccagataaaacctctcaggacagaaggggtgggacaatagcaccaaaatgcttctcctgataattgtcccaaactcatacctctaaacatcaccagcgctgtttcagtggaaggcagaattggtggaagaaggctgtggaagttattataattttggagctaataaaaacctctctcagacaggcttggccttggacgttacttgactcccacagcataccagatgaaatctggtctctggggacttttaaatcatcaatacccaagcctcagcaaagacaaattacataagaatgtctgggagctatggcttttggggagagtgattcctcaaaacactaacatcagatatatctaattccaggctctgccaccgctcatctgtgagtcctagagaaatcacttcagttacttgatccgtggtttccccaaaagtaaaatgaagcaaatcatggtgcaaatttcatggggctgttgtaagggttttatgatataatagctgcaaaaggccccgtactgtgcctggcacacattagggattcaaacattggccattgtaattttactgttattattcttattgataaatattgactaatcgctggctaaaattatacccttctttgaaccctggggaaagtatatgaacttgatggtagatgggcactgctgggggaagattaatggaggtgtcctgtgctgcctaaataataaatctcttctcaaagtggactccaagcagaagtgtctttcctgttatcagctggttggaaaatattaatatcacccacattctcaattggcctaaaacaccaccactagaggaaatgctaacatggctggcttggtttaagacatagactgcaaagcatcccgtaaccacagccaacattctgttaatcttatcagagggaagcagaatgctttagcagctgatggagggcagggatttaaagaattcactttactacctacagaaacaaagaacaagacttggaaacgggggctcagaagcaagaagggatgatttcagttctgatatgaccatacagaccactcagggaaaaacccaccatggatgagttccttcttgtcactatgaaataaactataaagagcgattgctataaagcatgggtggggtcattctcaatatttctttctgtcaaggtaataaatcccaaattcataagccccttcagataaggttagatgcaggcccctcactaaggtgaacctgaccttacttctacacccttcaattgagtgaccaaggattgatgagaaatatcaagtatttcataaatatttattttctaaatatacaactatagaaaagtgaggtgtaacatatagcttggatgaagggttaaaatgttaagtatctcattgagaaaaatgtgtttgacatttttacattagaacaacataatggagcaatgctcacgctaaactgggaacactaatgtgaactcaacttaaatattttcccacttctgtcactaacagtggacacagcagcagcagcagcagcagcagcaggagtagtactaatgcccaccacaactctcctgtacccctaaatggccagactttgtctctaacagttttctccacttaaagaaacaggggctctttggaagggttgtcctgagtagggtaaaacaaatggtttaagcctggaagtttcttttgtaaccagaaagcaaggatgctttctagaatatcacagggtggttctggaaggactaagaagctagattaaagaggtttcctctggtcaagctctgagattttgaatatcaaataagattgatggctataatcaattaaaacacatggagtctgtgaagagctgtaagttcctaatgaagctatgaagagaaaagttgatgtaaatggcaaatgcgatagggttttatttcatattatttttaatggcagatttatatatgggtgatattatttcttctattaaatatatgttgggttattaagcatcgataggcacttttctctatccttgtaagaaggaaagagtgaattttgaatacaactaatagtcctggaaaaaaatagaaattagtagtcatgcttggtaacatgtaaagagggaactgataacatggaaggataattggccaaatgtgctcgtaaggacagcaaactgcagggtttaaattcctcgtcttggccgggtgcagtgcctcacgcctgtaatcccagcagtttgggaggttgaggtgggtggatcacttgatcctgggagtttgagaccagcctgtgaaatatggagagaccccatctcaaatacaaaaaatacaaaaaattaaccaggcgtggtggcatgagaatctcttgaacccaggaggcagaggctgcagtgagccgagatcacaacactgcactctagcctgggtgatagagcgagactttgtctcaaaaaaaaaaaaaaaaaatccctagtctcctaggagatgaagcgcactttaggaaacactctggtctcagaaaaggataccaatgtgaaggcacggacttttatattcttaggccacatttaagctcaagtgcaataatgttgggagacactttatcagtttcaaataagaatcagtaaccccagagctggctggcctgagattatttttcttttggttctgaaagaaatttgtattcttaggagaaactgtatcacttcatactctaatcctaggaaacgatcgcattgactctaagaaagtaacagagaaaatataagaataagtataaaagtactttttaaaaccaatatatacccataatcttcatgcctttgtaaccagtgtaaaggtaagtgtgcatatatatttttcaatcagtatgacgttttgtgtgcatttttgctgactttttaggtgtttgaaacatttaaaagggtctgacatattaaacttatggttttatttaaaagtgttggagagtgtggttaaataattttgtaaacaatggtttataagtttgggaatttttaattgtttcaatttttaataagtttttgatttattaattgtgcagatagtgttcgaatgtcaagaggaatattgtttaatagatgtataaaattcggaagttaaatgttaaacaaagcacaaatatgaatcaggaacactaatcagtgctttgtttaatatttaactgattgctgagtcagttttggtgacaaatatcctaccaatgcatcacagccaagattccagagcccccatgtgggcaaaacaactcggtattacccttatggaactgtagtaaaagcagaagggacagatacatttttccttggggtatgtcatgctgagcttgcattttactatggcgattcttagaaaaggagaagtcttcatgtcttaaaggaattgatcaaatggagcttttcttggtcctttgcagaaggtgatttaattcttctattaaatatatgttgggttattaagcatcgataggcacttttctctatccttgtaagaagagtgaattttgaatacatctaatagtcttggaaaaaaatagaaattagtagtcatgtttggtaacatgtaaagagggaactgataacatggcaggataattgagggggatctttgggacaggagtcctaacctctcccccagttttctctggtgctttctgctagtgcctgctaagacctgaagtttacttgttttccatcagaactctgagattcttattttattaaaccatataatcaggattttatagtctaggaaaacatagaccattacctgctcagcgcctccagctagtgacatcttagaaatacaagcccctagttctcttagtaaccaaaggagtggagtcctttctgaaggcttgaattctatctgacactacacatttgtggatttctctgctttgatgccttcttgacagataacgtgcaatcccccttttcaaagtctaaagaaaacaggattgaaacatttgggagcaaatgccctgcaaatatggccaaccttttttttttttatcttccttttcattaaccacattgagagtcatgcatgaaacttagatctatattggtgtttcatttataggaagtgttcagctgtctgtcatttttattcaccctaagcatcttgaacatcctaccgaactgtaatcttgaaagctaatgcttcatgagaaaccttttctttttttctttagagcatacaagtgtgtcctatttaaaaggaacccaagatgccaaaattctcacatagaaacttagacatcttggcaattgttcttgcaatggaaaactgggcttggtagagagatggttccccggggaaactgaccatggtggagtcgcacagtcttgcagtaagccttcggacacaggctgagttcagagtccctagggccatctggagctgccagccagaaagtaacacacctttgtgaggatggcagcccgagggatctacactccatcaggactgccattaacagcaggtgtccttatgggactggaaggccggggaagcttgtcctccagccatgagcgttgcatagtctctcagtccattaaaagagccaaattaaaggaacatgcatccttttcctaagtctgtgatatctttctaaccattatgctcccaaactttatgataatcatgtaataactaaacaaggaacttacaaaaggtatcaaatgaatacaactacaataaagtccatttggataaagccccaaatctttacctgccccttcccgccccaggccttctatcatttgaccactgttgcctctctggcttcatcttggcaggtcccctcatgtgccctctgcactgaaagatggaggtaggtgtcttggactgaacctcccaggaggcatgaaattctgagatccttcaatgaggcttctgccatgaaccctcccctgacacctccccagcaaccagttcaattggtaccatcttccctggaggcacttctattggagtttttttgtcatactctactgcaaatattaatttatagatctatgaagatgtgggctctgaggacaggactgtgtgggattcatcgctatctatccagtggcctgtacagcacaacactcaaaaatgtttgttcaaggagtaagcaacagccactaatgactccaaacctggctatcaagtaaatagataagagccaacccggccaggtgctttcactcacacctctaatcccagcactttgggaggccgaggcaggcagatcacaaggtcaggagttcaagaccagcctggcccacacggtgaaactgtgtctctactaaaaaatacaaaaattagctgagcatggtggcatgtgcctgtaatcccagctacttgggaggctgaggcaggagaattgcttgaactgggacccaggaggtggaggttgcagtgagtggagactgtgccaccgcactccagcctgggctacagaacgagactctgcctcaaaaacaaataaacaaaacaaaacaaaacaaaaaagccaacccaggaaataaacacctttagagggcagttatatctcagattttaacaagaaatatttactttctaatatatatgtgtatatatatatatgtaatatatatgtgtatatatatatacacacacatccccagagtgaatttacaggtccaagtaacatatactttctgatatatatatatatctccccagagtgaatttacaggtccaagtaacatataggaaatgtcttcatttctcagcccaagaaaaggccatttatttactgacttatgtatttacttacttctacttttttgagcagtcttaggttcacagtaaaattgagcagaaagtacagagaattcccatttatctgtctccatacacttacagcttccctcacttcaacattccacattacagcggtgcatttattacaatctgtcaaccgacattaacacattattaccacccaaagtctatagtttacattaggattcactcttagtcttgtagggaaggccatttataatgtacattcccaaactgtctctgtgcttggtaatttatgttgaacattactgcgaggatgtggtgagaatattttcatttttcatgaatagaaggatcttgagactctttgatatatggtagagagtgatgtgttagctggtgggataacaatgcttttccttaagagtggatgtctaaagcagaagtcagcagaaacaggcgattttctgtaccaaaatttgccttacgatcaaaatttcaggcccgcagccatttcagcgggtcatagcactatcccaagaccgtaactttgatacaagccaccactgaaaggtcaaaattcaagacaaattgtcatactgctattttttaaggctaaacaaaaatttttctattcatattgtgtttatcaacagtgtgcttttaactaattagccatgaagaagggggagattggaacagaggagaagtttaccatctaatgtatgacaccaagacagttcagtcaaaatgtagagaaaacagaatctgtttgttccggctggaattgagaggacagttcaacacttcgatatttcatcatctgttattgtaattagtcagagatatgagcatctaaaaatttggaactgctaattagaaacaagtttaggctgggtgcagtagctcatgcctgtaatcccagcactttgggaggccaaggctgatggattgcttgagctcagaagtgaaagaccatcctgggcaacatggcaaaacactgtctctacaaaaaatacaaaaattagcgaggcatggtggcacaggcctgtagtcacagctagtcaggaggctgaggtgggagaatcacttgaggctgcagaggttgaggctgcagtgagctgagatcgcaccactgcattccagcctgggtgacagagtgagaccctgtttcaaaaaaaaaaaaaaagtttaaaccaaaattgttctaataatcatttcttctccctgaccccagaaaaagcatgggccacttgtcacccctcaacctactcctgacaagggggtaatattggatgattcaggatttggctctgagctgggaataggatcagtttcttctcggcagggggtggattcctgaacaaaattgggtctgttagtaaggaagtagggggaaggaggggaggacatggaggtgggctagataatcagtctgttttggctttgaggtcctttgtggctctcaaataagaaccccccacaaagaggccctgctgcagttgtgtttggagcagcatccagaacagaaagatatattgagatttcctgtaactttgtgacttctccttttgttttgttatttttatctcctctatttccctgtcttaccagcagtgagagcccttaacttagaacaacctaagaaaagctgctgtcttgttccaggacagccgtgtgggagtcacctctcagtgggtctgcagcaggagtcagggaggttcctcccagcaccgccctcctcttctagacagaagcaagtggactagcttccgaagctttgttcgaataacacttaggccatgcctggcacgcaggagctggtcaatgtgaggctgaaataaatgtgcagaaatggacatggtagagagggaagccaagcaatgaaataaaaaagcttggaggttggtcacactgagaggtgaagccagctggacttctgggtcgggtggggacttgaagaacttttctgtcttacaaggggattgtaaaatgcaccaatcagcactctgtagctagctagaggtttgtgaaatgtaccaatcagtgctctgtcaaaatgcaccaatcagcactctgtagctagctagaggtttgtaaaatagaccaatcagcactctgtaaagtggaccaatcagcactttgtaaaatggaccaattggcactctgtaaaatggaccaatcagcaggacatgggcagggacaaataaggaaataaaagctggctaccctgaccagcggcggcaacccagtggggtccccttctacgcggtggggggtttgttctgttgctcttcacaaaaaatcttgctgctgctcactctttgggtccttgccacctttgagggctgtcacactccccgtgaaggtctggtggcttcattcttgaagtcagcgagaccacagacccacggacacaacacctgggttccactcgcagcattgctgtttcctggttgtgtgaccttggacaagtcacttaccctctctgaacctccgtttattcatcagcaaaatgcaagtaataccactgaagctagaggagtctatgggaatcagaaataacacatgtaaagcttaaggtctggggcctggtgcttactaggtgctcgataaatggaagctgacttctctcatagaccaatcctcttgcaggggagggaacggtggttaacccccacacttctaggttctttgactgagctataaattaaatttacataagacagattagcagaagcaaaaacatttataattacttgcataggtatggggggcgggggttcccacaatacatgagactcaaagtagggccagatgattgaagctaatgtagcatcctgagctacagaaaggaataggggtgctttgggtttctcggagatggtggagttcttggagggtaaggggaggaaatgtatgataagtaaaggttgtctcgttataaagataaaaagcctctcgggtaatagaagctgtctctgagcagccctcttcctgatacagattgttttactaatgtggatttcctttatagatgtaaatttcttttacaaaaggacagcttttcagagctactcctgtgtctgcagtttctcataataactagcttgaaaaatgccaaagtagattttgctgtggcagattcctggtcgcctacagtcatattttggagtggtgtgtcctgacgcccaacgcagtctaattattttctaaattcctgtgccatatcctagccctgtgtcacctgcaccaacactaccctgtctcgttgctcatgccacaccctggtgtgaggctgggtcagagaactggcaaagatactgggaccctgttggcatcatgggatttgtgggtcagcttccctgggggtgaattgctgaacaaaattgggtctgttatcaaggaagtgcagtcgagggaaaggaggaaatagaggggggctttgtggatgaagtggcaagagttcagtctgtccccttggaagaccacaggtgtgggatatcatgagtgcaggtgtcactgacggcccccatgctgagctgccaggggccctggtgctcagccgaacctctgctttcccttagacttcggtgtgaggttgctttgattattaaaaactcctggcccctccctgatttctcaggggtgatgactttattggtaagaaggtagactctggagttggccagagttctaattctggttccaccattgactggctttgtaacttcgggcacgttgcttttgcctccctatgcctcagttttctcaactataaaatgggcataacactggtacacattttacaatattagtaacaagtacagcaactgtgagatttagccagctaatacatatgacaacatgacatccttggcacagcgtctgcaaagcacttaataaatgtcaattataaacaattctcagaaaaagatatacaaatggctaagaaacatatgaaaaaatgctcaacatcactaatgataagggaaatgcaaatcaaaaccacaatgcgacaccacctcactcctgtaagaatggccataataaaaaatcaaaaaacagtagatgtaggtgtggatgcagtgaacagggaacacttctacactgctcgttggaatgtcagctagaacagccacgatggaaaacagtgtggagattccttaaagtactagaggtagaactaccatttgatccagcaatcccactactgggtatctacccagaggaaaagaagtctttatatgaaaaagatacttgcacacacatgtttatagcagcacaattcgcaattgcaaaatcgtggaaccgacccaaatgtccatcaatcaacgagtggataaagaaactgtggtatatgtagatacaatggaatactactcagctataaaaaggaatgaattatcagcatttgtagtgacctggatgagattggagactattattctaagtgaagtaactcaggaatggaaaaccaaacgtcgtatgttctcactgatgtgtgggagctaagctatgaggacgcaaaggcataaaactgatacaatggactttggggacttgggggggagggtgggaggggggcgagggataaaagattgcaaatggagtgcagtgtatactgcttgggtgatgggtgcaccaaaatctcacaaatcaccactaaagaacttactcatgtaaccaaacaccacctgtacaccaataacctatggaaaaataaaattttttaaaaagtcagttattactgtgatcatcagagacccccaatttcaccccatcccttacccaggcgggcggacctacaggactgtggggcaggcgccgccccagcgtcaatccacccttgcagttttgcctccatctgcctggggaggcctctcattgcgagagctttcttctgaatctcacagtggctctgtctggtttggactgagatgattcccatcttgtacatgagacagctgaggcccagagaggatgccttccttcagcagggtctgagcatagtctgcagcaggaggaggattgagtcccaggtctcctgactccatgtttggtgctcattccatcccatcctcagcgtctggagaataacgggggtgggccggcagaggaagggtcaggaactgcttccccaaacccagctcctgcaggaggccagaaaaggctctgacacttccaccccatagccttcatgcctcccacgtggctgccaggaggcctctgacggagatgtgaaaaatgaaccagtaaatgtatcatgacttgtgaggctgtcttaataattaagttttattaaaatgaacaccaagaaatttcctgacatggtctgcctggtggaactcatcaaaaggtgataaatgagtgggttcaggggaaagaggatctaaaggaggaagtagggacagagagagaggccccagggtggagaagagagggaggaggcagggggaggctcaggagccctgagcagcagttcagttcagcacctggcccgctgcttccctgctttgcttggaattactgctgagggcactcagggccttgcagactggcatgtggagccaagcttcagtcacggcggactttaaatcccagctgggccactagtaactgtggcagctctccttcctgggtcttcctccctccctgagctgtgaaaagggagatggatcagaacaaactaccctcgcccttgaagggaagtggatggccatccatttatggaaaacttggtcatccgatctggtctgcagacattgactaatatactcaccaaacagtggtttcttctggacaaggtattgggactggggagggtgttgtttagagcaactctcttatttgggttttccacaataagcattgattgcttttgtacagaaaatgaatgaacacttccaccccatacagattctagagcacccaaccgatagttcaagatagggggcgagatggagcacagacccctcttaggagcctgccaggcactcctctccccaagcatggaaataaaggaaaatctagaaattccaggcacgtagcaagccttgaaaagtaaatgcgcaacttgacaagcaagaaggtaatagtagcttaagacaatagccaaggaaattagagtcataggatatttggtttcctgtagaaactaaagataacatctcaacctacgtccctgagttgtgtttcagaaacccagacctccaccaaatggaaagtgccatctgcaggcacagagaccttggataaggggaagctgaggaccgaactccaaccaccatgctttctcctaagtttcttgctgagggacctggaagagatcatgcccacgggcaagagctaacgttcttttctgcctacaccaaaattttagacaaaacttcacctccttaacccatcacaacactgaaaaatctttgaatccacctttcacttgccacactcccaaacttccgcttcaagatgctttgcctttttaggccaaaccaacacatagtctccatgtattaatttatgattttgcctgtaacctctccccctctacctttaaaaacccttacctgtaagccatcagggagttctgatcttaagcatgagctgcccaattctgcttgcttggcgccctgcaataaatgcctcactttctctggctgcaatcccaatatcagtgtttggctgcactgtgccgggtgggcagacccaagatcagttcggtaacaagagtaaaagtctgctgagagacaggtcctgcccttggggagctcacggtggtctaggggagagggggcatagggcaattctgttacaggcatgttgattctgttgtgttaagggctggggcagagggaagcccagagtggctaatgtggggcatagggaggagcctcaggaaaggtttcctgggcaaggggacacctgagctgagatgtgaagaagagctcttttactatttagtagaagagaggaggaaaggagaaagtgggggccagatgtgctcaagtgaaagtgcagaggcctgaatgagcactgggaattcaaagacgggcagctagttctgtaggaatggggcgacagctcagattggctcttccattttcacacagggatatcaattccactatctgcctggctgataactctgccctcaatcaagaataacggcattctgggccttgccaggaaatacgtgaacctctgctgtccctatctcttattaagaaagagagaaaagctctattgaaagaattgttatttatggaggattgagtgaaggacattcattctgcaagagtataggttttatccatgaatcaagtcaggtcatcagaaaacttgcacccaaggacagagagatcaatggaagagaatggaaaggccagaaatagacccagatacaaatgggaattcattgctagataaaggtggctttgcaatgcagcaaggaaaagatggctcacgtgttgaaagccggagagtaagagatatgagaactgagaagcctctagcgggtttggtaaggtggagggcattggtgccctcagaaagcacagtcttggtacagtcagtagctggggaggcaggaagtagagacagtgagaggatccactcttgagagaagtttgggcacaacccagaggggaggcatgaggccacaccccaaaggcgatgaggaagggagagagggatgttaatctttattcttatgggaaacatgaacatgtttttaagatatattgttttttgtttgtttgtttgttttgaggcagggtctccctctgttgcccaggcaggagtgcagggcgtgatcatggttcactatagccttgaattcctgggctcaagtgatcctcctgcttcatcctcctaaatagctgggactacaggtgtacaccaccatgctcagctaattttacatgtttttttgcagatcgggtctcactatgttgcccaggctgatcttgaacttctggcctcaaggaatcctcttgtctcagctcccaaagcttgaggattacaggcatgaaccaccacacccggctcaagttatcttgttaagcacaaaagcagtacagaatgttagatgcagaatatatctctttgtttaaaaatggggctggggagagattctatgcttatgcaaataacatttctgggcagaaacacaaggaacttgtaatgatggttacctctgggaaatggggcaaagggcttcagctttttccttacatactggttgatttttttttttcattatagccattaaaaaaattttgtttgagacagggtctcactgtgtcttccaggctggagggtaggggcgcgatctcggctcactgcaccctccacctcctgggctcaggtgatcctcccatctcagtctcctaagtagcggtgtgccaccacatccagctaatttttgtgtggttttttttttagtagagataaggtttctccatgttgcccaggctggcctcaaactcctgggctcaagctatccacccacctcggcctcccaaagtgctgagattacaggagagagccactgcacctggcctaatgatattttttaaataataaaaaaactattaattagatgccctcaagagcagctcttaggcgccaaaaatattgatgaaaggtttctttgtttttcaaaattaacattcaatttattaaagtaacaaattcatatggacccaagttcctccataagctttgaaattcagcttacgaat

SEQ ID NO: 3173 - DNA, 1712 bp, Homo sapiens
cagcaaggcaactggaatgaaagtccctcctgtcattcattcaaatccaagatcgccacccaggcaaccctcatgcagatggctgagtaatgcagcagccagcaccagggctccaaggaggggcaggaaagagagagaagccagttcctcgtgtcctcatttcaactgactgtgtgttcctggtaccctgacttttcctggttcctgcaactccagactcctgctggggacagaagaaatgtgggtatttcccggtcctcttgtcctctccaggctttctgattttgagcagggtgagtactatgctagtttcccagattctattttcatcctgctggtgctggatccaactctggacattacagcatatcccagcaaagctgtcacaggctggccaggaaacataggacgggagggacagaaggagggggtgagaagggaagactgcagcttcctagcttctccacccacagccaatggaaagggctctgaaggtgacttatatggcctttggaacccaccaccagggagagaactcaacaggtgcagactgttgagcagactgttgagggagatgataagggaagagaccaggaactggaagttgggcaacaagtcttctagccagggatgttgtggaagcccatgcttcataaccttatgtggataggcagtcgatggtcttatctgcatagacccatactctgctgctgacatgtgcgcctttcgggtgatgacgcagtcctttctgccccattacctatatacatgtgcagaagttcttcaccatactctagagtccaacttatttgtctctttttaaaacgttcagttaggaggctgggcatggtggctcacacctgtaatcccagcactttggaggctgagatgggcagatcacctgaggtcacagagttcaagactagcctgaacaacatggcaaaatctcgtctgcactaaaaatacaaaaattagtcgggcgtgttggtgggggcgcctgtaatcccagctactagggaggctgaggcaagagaatcacttgaacccgggaggcagagattatagtgagccaagatcgcactactgcactccagcctgggcgacaagagcaaaactctgtcccaaaaaaaaattttttttggttagacagtaatctatactcctagtaaaatcaccatcatcatcatcatcatcatcatcatcatcacccagccctggcttctttatattaaactactgcctcccaaagataaaggccagatgtactctttgccataactttcaccacattcatataaccagaggcaaacactgtttttgataatattttataaaaccatttcctgttttataaaactggattcatgctgtgtacatttctgtgaagattgcctttcacacttcttgtagttttttgccaggccaaaaagtgttgcaatagacatcctcaagtacagatacttttatttttatagagtagattctgagaaatgagattgtagggccaaagggtatgcgcattttaactttttaatggatattgccggatcactttccaaaacagttgcggttattcctgttcccacgggcaaagtatgcaagtgccttttcccccaatcctttccggcaccaaggtgtcattttttctcacttttaagcaaatagattgcatgaaattatcttactatttcttaaaatttcatttttctggc

SEQ ID NO: 3174 - DNA, 2853 bp, Homo sapiens
agaatacagtatataatacatataatacagtatataatacatattataattatataatacatataatttcctgtttatgttatctatcagtaaggcttctggtcaccagtaggtaattagtagttaaaatttggagaagtcaaaaagttaaacacagggttttgactgagcagggacttgattcccttaacccttaccttgttcaagggtcaactgcatattataatatctttggggataaggtgggaaatgacttgaaatcactcaaccagaggattttaaaagtgtgagggagaaaaactcaacttagtttagatgttcattgattcgctcacatattattgtgtttctattattcccaggaactatactgctgggaatactctgataagagttggacagagtctctgccttcatttagtgtgtacactttataaataaactttttaaaaagatgactactgaatggagtccatttatttaaaaatgaaccagacacagccctggacagaaacttcctgatgagatacatgaaaattctgaaatacaaaacataatgaattgtaaacatctttctatccacgaaagatggtcatgaatattttcagagttcccccatggagaagactgcaaaagctgttttgatacttgactttccttgcctgctttatcacatttgagaaactacaaatggagtcaaataatctcatttggagtcggctgagtaaatccagtaatcctctaataatagcgacctcaggattaatttaaaatatagacaaataactcacctaaaaatatcacctctgactgaataatatcaatcaggagtattttacaatatagacaactcacctaaaaatatcacgtttgactgaatatacctttgatttttcaatgtagtatcctgaagatatatttggtgtaacagctcttcaacaaatatttatagtgtcaggcagtgttctaggagttgtgacacagttgagaacaaaataaacaagtctctgctttcataatgtatacaaacggtaataagcattaagaaagagaagaaaaaggaggcaggaaataggcatagagtgagattatagtgatattttatataaggcagtaaaggtggacctttttgatttgagatacctatttgtgcacagacaaatgaggaagcagaagctgtgtggctatctaggagaagagagttttcaggcagaaagaatgggaagtacaaaggatgaggaacattaaggagacagtggggctggagtagagagagtggtggcagaaattaggatcagagagataagacattggattgtactttttaaggtaaaaatttacatttaataaaatgcacatatcttaaagtacacaagtaaaatgtagaatatttccatcaccctacaaaattctcctgtgaccccttccaattaatctaattgccccacaggtgaccactgttctgtttttttttttaatcaccatagattcattttatctattttgaactccatatgaatggaatcatacaacatgtactctttttttttttttgagatggagtctcgctttgtcaccaggctggagtgcagtggtgcaaacttggctcactgcaacctccacctcctgggttcaagtgattctcctgcctcagcctcccgagtagcttagactacaggtgcatgctgccacgcacagctaatttttgtatttttagtagagatggggtttcaccatgttggcaaggatggtctcaatctcttgacctggtgatctgcccacctcggccactcaaagtgctgggattacaggtatgagccaccgcacctagccaatatgtactcttttgtgtctagcttcagaatgtttattttcagagattttgtgattaaagaacaggtgcatattttactatgtaaaatgttgccatatcagtttttccaaaatggtgtgccattttatgcacccctgcaatgtataaaagttctagtttcggttgatgttactgtcttttagtttatctgttttagtgagtgtgaaatagtaatttttttgcagatttaatttgcaaaaaaattaaacactttctgagaaagtgatattaaacactttctgagaaagtgatattaaacactttctcatgtgcctgttgggcaatatttatctgcttttgtaaagtgtctgtttgagacttttcctctattttaattgagttgtcttgttattattattgattagtaagagtccttcatctgttctggttgttttcatggtggtatagtgtctctcttatggtggtttctctggtgagcattgtcatgggatatgaggattgttatgcttggtgcttattcccattcatcttttcatgcatctatctcagacttcgttgttcctgatcttccaatctttcttcttccaggtgcctaagtagctggctcagtcatttgccattgtccatgaatttatgtattttctaagcttggctcaggtaacttctctttccatacaaagaagatgaccaggtcactgcccaaaactttgctcacttggaaatttcctctcattcctgtctttcaagtatcaagggatactgagccaatccatttgtgaaccaagctctgacttttttctcccccatcaactggtgataacaggtcttccacacgatgtgagagagaggcactgatagaatagtagtagatgacattggtgtctaggctatctgatcatgtagactgcatgtcctgcacagtcttgcctgtgcttgatctcacatgtaccaattctatcttcttatggattacttctgggcctgctcaaccttatgccttggtgggtctgacagtatac

SEQ ID NO: 3175 - DNA, 2549 bp, Homo sapiens
gtcattgatttgactattagccttcacaatgatgcttcattgaaagtatcgcacattgttacattacataagtgaagctttaccacctcttatattgcaggtttagctctgtctcaatcctcaacaagaacaaagaagaagggaaggacaggggataagagtcaagtgctgagaggcaaatacaagccttggaaatccattctgagtcacaaatctctctcaagaagtgggccaaggttgctgttgccactatcccatgctgtccaagaactgaggccattcttttgctttctgtatttggaagaacaagtgccaaaggcaattcaaataaacccagtgcccttttcacaatcttcttttggagaatcgtacaatcaaagtgtaatattcaaaaaaagttggccaacccctgcctagagctgaatagaggaagaggagttgagaaggtgagaggataaccaagcacagtttgaaaagccatttggatatctgctttttatctcttggttttccctagtgtgttttacatttacattcagatttagagctctaagccatgggagaaagcttactttcttcttgtgttagctcaggtcctctgaggagcagatgccaagacagtagtagacctgcaagagagttattggagacaactctcctgtagggaaaagcagaggaagctggaagaggcagggaaagcccactctggaaggggaggaaaaaggaaggaaagttgattgataggaagagtctcacactgcagcatagtgctgagatatttcagccaggccttagagtttgcaagccaaactcacccatgtgaggagtcctgcccctcactggaatgagctagtcttaccaccagaagcggggctctgtgagaacacagcagcctgctactatactgtataattaagtataaattcaggtctggacattgagtctctctcattccattacagaactattaaaaaataatcctgtattaggaaggttgtttctaaggcataaaaatcatagaacagagataagaagccttggaagctacaggccatgctactctttcagatttatcttgtttccaacctgcccacaatggttgagtggccattgtgtatacagagcactaggttaagcaatgtaatgagaaggaagaatataaaagattaaaaagaaaagtcactgaattcaacagggtgagtataactttggatttgctgacagagggacagtgatacctgattttttttccatgcagctgattttttaggccattggctatgagttagacactcagagcacatatagaccaggaaaacttccctcctgactttgttaagtgccctctgactcgatagaccacagaatgaagaatctattttatgttggtctttgagtcacttccaccttaacttcctctctcctctgctgtccagatagaatgtacattgacaagagtaaagatactttatacaagccaaattgcttttgagtttctgattattattgctgcttcacaatggaaacaggcagagataaggaagggatttcaaaaagatgagtccatataatgttatttcacaatctaaatgcttggctttcttcatttcttttctctctttctctattccaaactccttttgtcaaaacttgattaaggagccactatggccaccagctgaatagtgaatacagtataatttactatcaccccaagaatgtcaaagtatttttaaataaataagtgaataaattgaggttgatattgataatgtatttttgctccctgttcaagctccttaactggatgacctggaatctcaagaacttgttggtgattgctttaaaaagcagaattcttctagaatacactgtagttttagaattagaagacacccttattccatgcaggaatattaccaagtcagcttttattgctttctaactagatcccttagagatcaagatagcagttgcggatccttgttcagcttaaatttatgtcaccttctcatatctctgtccctcactgccatttaataaagctctgtcatcttttgtcttttcctccaactctaaatgcaattagaaagaagacagagaaaaggagaactaactttctgtttctcaaaagttaatacctgtagcttccaaagcctcttacttctgctctatgatttttatggcttatcagcaacctttctaataacagtttgctggtggaaatttttgctaattctacaatagaatgagagagacccaatgtccacacgttaatttataattcattatatggaaaagtagtattaatagcattgtatttgcagatatacttttaaggacaagcattcctaccttatgtaagacccagaacttgctgatgatatgaattttgtaaaagcacattctgaagttgagcctcccacaatctcaccacccacagtgcccatcccaggaagtgcaagcatgtggaattcaaacttactggaaataaataaacatgaataattttaaaagatcagaattaaaattaataaatgattacagct

SEQ ID NO: 3176 - DNA, 2754 bp, Homo sapiens
ggaggaggataccctttgaggtcctcgggggacttgcaagcagagcagggggtatggggagagcataaatggagatgagactctgttcacactctttcctgatatccctgtgttttcaaagagaaaactgtgtcaaaaccagggaaggggaggggggaggtgaaaaaggacattttccaagaactccaggcctacagtccttagtgcaacagtacctgttgtttacaaagattcatctgcctctgtcctgcatttccctccgtggacaccagggcactgtctgatcatctggtcttctcagtccccggcaaagttcacggaccctgacacaccctgcagctgtctcctgaaggagtcagagtggaccactgaatcccagctgctcttctttcaaacgatgtgaccttgggaaagttacataacctgtctgtggctttgttttcttccttataaattggggtaataacacctacgtgtaaaggttattcaggtaatgtatgtttaaaagaaaaaaaatgtaaaaggaggaagtgaaaatgaggcagagtttgtgtcctgtgaaaggtaaggaaccagtcacaacatactgataatattaatagctagaactctctctgtagctgcccctgccgagtgttttataccattatctcattcacttctcccaactctttgaggaagagactgttgtacccatcatatcatcatacaaattgctatacccatcatacacataagaaaactgagactcaggaagtgaagtactggtccgagtggcagagctggaattcaaagcaagccttagaggctaagcactggcatttctgtacccatcttgggggagagctggtagctggctccagggaagcatccagcggaagacctggtcttggctgtcctcgtttgacacctactcttagtaacccagaagagtgcaggcacagtgggtattgcaaaggccggagaaggaaaccaacacagacatccgaaaaagctggtgcagagcaggagagaggaaatgggattcagtttggggaagtacagaccaagctagccacacagagctaatccacagcaaggatagagaggtcaggagagaaaaaaaaagaggagagctgggagctgaaagcagcgaggtggggtggctggctgtaactgagatgctgctctgtaaagtgatgaggccggggaggccacatctgctctgggcagcactcgcagagctgttgcagcacagagaggtcttgctctcctcttcacgtgcacagtggggaggccgcattcgaggctcagtgcgtgtgcgtgcgtgcgacacacacacatgctttgatactgagccccatgaaacccccatgagtctttttttttttaactttcctcctttctaagtttgacctatatatttccagatgcctctaagggaaattatggggctattgcatttatcgaatatggagtatagatcagagtggatgtggaggcagcaaggaaggaactgaaaaaagcagcactcagccatgctgatgagctagtcccaagttccagatctctctttagcctgaagctccgttccttcctgtccatctagaaggcaatgttgcctaaaggcaagagcctggatttatgtacggctcctgcttttactgcctatgtgaacttaattattctaccttatctggttcaatgtcctcaactttgaagtgagaacagtagtaatacctacctcctagggcttctgagaagatgaaagaccaaagtgccgctcctatgcaaaacctatccttgggaagtggagatcattattgcctttaaatctgtccaagggtttaataggagtgcattcacaatttgtctgtaggccttttattcagatgcctttagattttgctaaatcagacattgtacagattgacagattgaaatccatagtgaaaaaaaaagctagtttgagggctttcttctggagctgaaataaagcaatcctaacctttgggaagctggttaaatgggttcagagtagagcatttctatgtacctctggggcatttcaggcctggcagcatcaggagggttctcacatgtggcatgggcagcaaagctatgtggggattctgtctttcccaaacctcactgccttccatgtctcctaagacttggtaggatattcaaatacgacacacctgtctctcccagcacacagattatagctgtaggtcttcccatgacaaggtgtgggggaaatcaagtgagggattctgggagttttatctttcccttgatttggggggcataatgcctgctgggaatagaaggacggatttggacacttcagctggctgattcctgggaggggaaaaggacatctctggccttctagccagaaggggcctctggatcacccagtccagcttctagaaggctcgaggactagcattgtgtgtttgtggtcccttgtcagagtaagtgataggagagcctactcaacaccccaagactcctcagcgagtgcactcccacttcatcatcctgagtgaacacgatgcctccaggaatgtgggagacagaagccacagcggattcttttttcaaacccaagcaaggaaaatcagagagaagcaagtcaaatgccattatcttctctctgcagaactgactaagcaaaattatgaataggccaagaatgacttttctactgattgatgaacttgaatctgttcttctaggatttgattattcaattaataaaatatttac

SEQ ID NO: 3177 - DNA, 5796 bp, Homo sapiens
cattcatcatgttactactcctgaaagtgactgactcaaggaccttactatagatcactaagaataaaagccttccatgatattcattgtaacttcatattaattatggaataagttttccacaggactttttctggaactgagtatagtggcacctggttgtttgcaaacatggactgcgagcaccgagccaaactagattggcggccatctttgctaccacatcaagacagcctgccttgagaatgaagccagcacagtagaaagtagatccaaaatattgagagagaaagagagagattatttgagttcagcttccatgaagtgctcaggccctgtctctatgtcaggttttcttagagcctgtcaatctctcagcattgattttacaccaccacatggggtccttcctaatcccacaggcctcactgtctccagacttacgtcctctttcatcttgctgccttctcagcaaggtaaatccccaattcttccttcagcatgcaataactacaataacagcaataacactaataagatcacatatctaaggagtgttttattgtgtgacaagcactgttctaaacatattcaatttattgtctcatttaattctaacaaaaaaaaatgtagtaattattattattaccccaatgtggggtagtggaggcccacatacattaagtaaacttatctttatctactttttaaggacaagttttgtttgtttttaaaattttttttgtcttgatccttcaggtctttgccttttgatttctaaaacacgttttttctcctaaggaaaaaaaaaatctcgagaaagaagaaaagctttgccattcacatcagtttactctgaaactagttttaggagcttatttcagaagtcagaaactgaacattgatggatgattctggatgtttaggggaaaggtaacaaagaatatggaaaggacattggtagcactgtacaacgggaactactggaaacagactcaagtgccaccaggaccctctttccagcactaacctatgtgcactttcttctcttttggtggcctggcctccttaccaccatgaaaaacatgtcctccagcaggtcctcagagtcacatggtaacttttgccaccagaaagaggctgactcttttttcctacttgcagtttaaaataaaaattccaaaaaaagactctcattgtcctggcctagagcattgtcaccctgggttaatcaaccatgccctaggcttgggttcgcaggagatgatggggagatctttaagaaccactttctagattcaatctccacccccacccttccacgatttaagtggaattcaacaatttctatattatcatcaaaataaaaataacgatttatagaacctcaagaggctcacctaactgaactgcagtcagaggctgtaaccttctggttaagttcagccagtgggaaacctcagctgagaggcagagggagtgagaagtgtgaggtggagctgtttatttccctggctcctgcctgtgagttcatcacagcctggttacattcttcaaccaaaggacagaaactgctcccaagggagccctctccacatgacccttctgggatctattaaaagctcttcctctattccccaatcttggggtgggaggggtgggctgacaaccttactttcactggctgaggggtgctgcactatcccttgtgattttctacagcccactcagaacttcctcctggaattattttaactatagggtgccatatgtttcatttgaccctgacagatacagtcatcacaaacaaacacttattactagatattgacatatattaaaagagaattgaatagaattcttgatctcattccttcatctttatcaattcaacaaataatgactgggcttctgtatgccaggccctgggcacatgttcatgtcatgcaatgacattagtatatgaccaaagtgatgatatggctaatattcctgggatgcaggaggaagaagattcatttgaagcttctcctctgaacgtggatgaaatgtggtcgagaatataagctctagcatcagataaacctgggtgtgcaccccagctctgcctctctgtgtgattctgggcaggttactcaatgtatataaatctctgtttccccacctgccaaatggagataacagtgagattcacctcagagatctattggaagactatataaggtaatatgaagtgcttatcgcactgcctgacatgtagcaacggcttaataaaaagtattcattattatatatgtatacaatatacagtcatatatcatatataatgattatctataaaatttaattctatttaaattcagaaatcatacattaaaaatttcttatgcctttagcattgtattagactctgaggaggataaaatccgagcttgcttaccatttcactggaaacgcaggtatgctttagccaatatcaagtggattaggagccaggatggcagtggggacccagtgcatggaaaggagggacatttttacctgagaggaggtagagtgctacctggagaagaagacatttgagatggtcttgaaacatgagtggctgtttctcagatgaacaagatggggaaagatattccatttgaaaactaaagagcaagagtaaggacacaggagcacctttatagacagatggagcctgtgaggctggagcagtccacaagaggggcactgtggtagcgggagaaggggcagtagggaatcacactttagacctcgctaaggggaatgtcatttaagatctggtagatagattggagcgggagatataagaggtagagagccagttataaagttgttgagactttgaagtatgtccacaacaatggggcctgggaaggaagagactttcaaggtcaaaccccagcagtattgaacacacttttgagatagtcacgtaaatgtacgaaaatattgtcttcttgttctctctcagagcacttgacaggaaacctaattagagccacttgtttctttcaatagagtccacccagaagattaaatccctccatgtttccatactcttttgattagcctatggggtgggtgggtgtgatttgaaattactttttagaaataaattttatgtgtattttcaggtcctcccaaacattttcctgtggtcaccgtcaatcatattttgaaagatgtagtaaccagctatctacaagtagaagaatatgaaccagagctctgtagacagatgactaaaaccatttctgaggttattaaagcccaggtcaaggacttgatgattccacggtataaactaattgtgattgttcacattggacaactgaacaggcagagcatacttattggaagcagatgcctctgggatcctaaaagtgataccttttcatcttatgttttcagaaattcttctctcttcgctcttgcaaatgtctatgcagtttaccttgagtgattgaaaataagaaatctagctcttacttttgaaaattctgaggcaggctgtatgtctgtacacaaaagttttactgccaaaaactttgagaaagaaacaacactgatatttcaagcaactggaagcttttgaattttttcatattctagtaaagatttggggaggggagggtagccacagaaagaatcttgtttatctaaagcaggaacttgatcttggttttgctggattgctttccatagacatagattcttattaaatatttgttttggtactaattattttaattattctttaattagagtgttacaatttcctgcattgttttttaataaaaagaagctttagaaaaactatggctatataccctgaccaataaatgatagtagaatattcaacatggtatacacaaatgataaataatgtgcctcagtgctgcatataaaagaatactggttttcattttgtacttaataaattgagcagcattcattaagtgcaattattgttacatgtacctgacagttgaaactgctgaggtagaattaatggcttcataacaattatcgtggtcccacgggctgcaagctaaaactagaagctcttgtggcttgcctgcactttacacaattgtgggagaaccgaaagttggctcttcagtaatggaaactataaagtgaataaaggctttttgggacactgaagtagacattgtgatattaaatatacatgatgcttaatactaaatgtgtctgtaacacataaaatcatttattggaaagagacattgcttttaaatatcctaggctaacaaactttttcacaaaatatatggctggcaccttaacaaataaagcatgtgtagttaccattttactcctatgaatttaatactaaagtgacccagtgaggtttttgaatagacgggtgctaaaatttacagggctgaaatagcttattattctgctggttaatgtatcttacgccacggatcatttatttttatgaagctttcaagtctttgtgtgcaagtaaaatgatgttgtggcgttgttcttggatggtaagtggactgcctagaggacatttgttaaaggtcaaagacaaattgtacacatatggagaaaattagcaatgctgtagtcttaaggaaaaaatgatttatcattcatatcaaaaagagtttagcaaatggaaaaccagttaatgctttaattttaaaatgttttggtgtcttacttttccctaaaaatgacatgtagtaaaaaatggatacttttaaaatcccttcccttctgctattttctggcttttaaagtgattattcaaaatgaatttgtcaattttcacttttttttttctgttagtgcattagtgggaatatgtctatgtaataatttatcacaaccaatatttgtcaatctccatagaacagttttcaatctggattagattacacgtataacaagtaaatgagcttcatattttcattacacattggtgaacatctcccttcgtggaacaacagcgggggtaatcatatcactaattttgtatgaataaatgaaaatgaagaaacttctttaacatatacaaagtctattgtaacaatgactgtttgttttagagttctaaattctaatccatgagataatttcttactgtcttccccaggctgtgttgagaatcgaaactgcaaaacatgacggcagttaaaaaacaaaaaagaaagcagtttgccagcatattgctacacactgtaattcagatactcagtgatgaattctagcaattatatagcagtataagaatacatagtaaaaactcactccttgcaactaacttgggagaagctagttatcacacagaactttatcatgagaaatttttaatgaaattatcacacagaaccttatcatgagaaatttttaaaacaatgacactataaatttgaaggaattgttttactttgaaatgccctgaacttccctggtatttttttcctctcctaaagtgccatccttcttcccagaccagccatgcccatccctgctccagagccttcactcatgctttcctaccttggaacaccccctcccacttaagccactttcttcgcttttcagggtcacattcaggtcttaccttttctctcagtccttctctattcactgcttgcctcctgctctctctctcctctgattattctcgtggttgagctcttgattgttctctagctaacttttgaattctagttttgtttcccttactattaatagactgaagacatattgaggacatggacc

SEQ ID NO: 3178 - DNA, 685 bp, Homo sapiens
ggcagatgccacgttccagtatgttttatggcacaaaaagatcgtggtcaccagatggctgttgcccttccaggcttccagctcctgtgttccagactgaagaagaggaacagaaaaagggttccaccttggcatggtcagaaacagcagttgactagtgaaggaggaaatgaatgaacaaaaaggaagatctctcttttctacagcaagcagtagtttctcacagcatccagcatagtgctggatgcagaaagtccaagatcaagatgccagtgggattggtttctggtgaggcctctctttctggcttgcagatgctgccttctctctgtttcctcacatggtctttcccgtatgtgcacactctcctgatgtctcttcctcttcttatgaagacaccagtcctatcggatgagggttccaatcttgtgacctaatttagccttaattatctccttaaagaccctatcttctggtgaaatcacattggggattagggcttcaatatataaatttggaaggggaaccctgtttggttcataacaccacctaagcactacttcctcaaggtttctcaaacacatacagtttagtcagaactacctgttgtacagttcccaaactataaataattttttaaattacttgttcaatggctgtctctcctagtagtctataagctcca

SEQ ID NO: 3179 - DNA, 3116 bp, Homo sapiens
gaaaggaggagaaggagggaagataaacatcaaacatgttcagcctctaattttaacaatgtctgtatcagtcactgtatactcactaaaaacactactgccaaaatattctaaatctaggggcttactttagaaggttactatgtatcgtttcaatgtaaaaaatacccacttatcttaaaaggaagtgtgatgggaagagcttttaagagttattgtttgatactgtgataggcaaataatgtccttttcactgtgcattcttaggatggaaagtcaagatttgtggcatgtgtgtgcatgtgtgcatacatacgcttttttaggtatgcgtatgatgggaggtgagtagataatttttctccaggattttaaaagctgcgtatttacatctcttcctaaatcaagcacaacaagaaggtgttaaaagtggtgaaatataataattaacgaggggaatggaaatcaaatgacaataaaattacatcatacacagacgagagttaagtacttgtgtagaggaattaaaccgattaaggttttcctgcatatagctccatacacacattacttccataactttaaataatatattttgtttttttgtcctgggtgtattattgaaataagtacattccctcttactcgttcttctcaaccccagatccattttccaatcccccactgatcccatgtcagcatgctctgtttttgactagacaaataatacacagatttatttctacaggaaaaacctctggtaaagtcatggagtgcctacttgaacgatattcaaaaggaaaagaagagatggaaggaaactgttgcttcattttctgttcatggaaggggagagagaatatctgagtttggtgggagcaggcacagacagcagaagagttcatctgttccacagtatcagcttactgagcaacgttatccagggagccctatacctctggccattgctgattagacaagaataagcatttggttatttgtgacaaacctgatttttttccagtgattcatactaatagtgccagagatattccgaggtattcagagatattgacaccttaaggttatatattctaaggccagtggccaatttcatctatgtttaagttaataattaaacagggaaatctggtgctattgtgtggtctaataaataaaatattctgagtatttggcttaatgagcatgccttggaatgagtggcagatagagaaaggagaccagctacctgcttactttttagttcctgggagtcccggctactctttctttcagtcagttggtgagattcccttgtgttcatcggatacattcattttttcttagctaatttatgttcattaaaataacactatccttaaccaggaagaataataaagtgttccgtaacatacatatttagattagtcttcactctgaatttcttttgtttaaagtgattcaaagaaaccatttagctttagattgacacatttccaggggaggattttcacctaaaagaacagactgtggaaagacctacgggcttatgtgatgaaggaaaaacaaagagaactcaaaagatgaggaaagaacttgaaagttaaattctgttacttcatatcagtaagtgatttcttctatataatttacactgtaatattctttaaatgaacaaaaatatgtatatttgtaaaaggccctatgcatacactagtaagaaatgtgttaaaaatgaaagaaaaatgctgacatgcctaggaatgattatgataatgataacgattgtaaatattatgggccagacactctaccaatacaacaaaaataacagcaataaactttacatggatgataacattgaattctaacaacagttttatgaatttagaaatgttatgtctattttatgaataaggaaacctagacttagagcggttaaatcacagtccaaagttatacagctgtaatatggtggattcaaattgcaaaatcaactgagtattgttttagagtccgtgatcttaagcactctgctttaatatacttagaggaaaactttcctcaatttctggagatgaagaaatggaaaattatccaacctagtggcaatgcaaaccatctgagaaaggagagtctgggagtgtggctgtctgagacacatcatttcatcccagccggtgctcttgggaagaattaggactttgtaagaaatacttaatttgaaaaggattatcttgacacttctgtggaaggtcgaccagaaaaaagaagatacatcataagactattttagtaattcaaatgaaatgaaaatgtccagtttggggttataattatcaaggtttatagaagctggtaaaggagaaaaattgttacagataatttaaaattttgagtctggtggactgaaaaaataatgatgccattgggagcaaaagtaaaattataaagtgtctgttttttgatgagggaaaaaatatatttcactcaagctgtgagcaaagatgtgagatagatcttttcttattcaagtgaattatcttcctgttctgttctagtcaggctttctgagtgtgcaggtcagcatctcaacctcaaattattcttttagctcgtcttattgtggtgtttgtcttgttctttgagactgtgtcttcttatctcatatccattcttcattagctggatagtacactatcttatatgctgatatcctgtcttgtatctcaaaaagatccacggttatggaggccagtagcttaacccagtggttggagattctaactagtagtagctcttcggtgccaactttatacatacttggattttgacttactgactgatacgcacaattcttgtagtgtcatattgtttaccttccaatatgtcagcttgataacttgcctcagataaccttgattctcaaaggaacatcatcatagatgtctaccaagtttccaaagatcagccatttccagtggagcagattgtactcgggccatagtccaaatacttattttctttaatttccctgtatattcattatgccttgatgttacttaatagatcagatatatttattacacatttgcctatatattaatacacatgtg

SEQ ID NO: 3180 - DNA, 1245 bp, Homo sapiens
gtccaaatgtgtgtgtctccctcaaatttgaatattgaaattctcacctacaatgtgatgctatcaaaaggtgaggtcttcgggagaagtttacttcttactgggtggagacacttggcatttgtaaatgagaataccaatttgaaggaagataagaaaaagaacaaaacctcctagcataaacaggcacccccttctgcaggtctcagctccggtgaagaagaaggccagctgcccagcagacagggacaaggagtgtgcccacatctctggggcaggtacagctgtcctaggaagtggaggcacctgctgagcttgtacaaaaaaggccgcttgggaaggttgaagaaatccagttgcgtgagcttgacaaatgattagaggagaaagaaaaagagcccgcaaaacccacgggcatttgagggaccgaccatccgcttggagtcaactctatctcataaagaacgaagtaaatattccaccccagcctgaggactctcggcatcttggcatcttggggtctgcgatacatcaaagggaaaggatgaagcattgtgacaactttaaataccaacggcagcgcctattcaaggaaaaccacagaggggctgccttccttacccagaacgccaattctgtttcctaggaattactactaagcagctttttatttcctgcaggaaccctccctcacttttttttaaagatgggaaaggagggcgatttagggagacttagccttaaaagctcgttaaaatggcactggctgcagcgggaggatggagctggaagtgccctgtgctgtggggcggggactgtcacctcagggccctgcaggaagccgcattctcccaactaggtccaaagaggactcaggcaccttcggagaggcccttcccaacttcctccagagattagattagcaaatggggaaaatagtagatttttattaaacattaatgaatctgaacttttcttccaaagcaggttcaagttcaggacacatctttgacagcttttagcagccagctcagtgctggaaggtgccctccatataaatatttttaggtgatgtatcatttctgatatagaagatgatggaatgtggattttaggatctgggttcaaagcccagctcttcagctgtttgaggctgagtgatgtcaggaaaaccctagtctgggactctctccatctgcgaaggtgccttccttttcacagagacgttaggaggctaaaaccaag

SEQ ID NO: 3181 - DNA, 2983 bp, Homo sapiens
gccaactttggcccacctttgccaacattcattattttttgtctttttaataatataatagaattttaaaattctgactggtataagacaatatctcattgtggttttaatttgcatttctctaatgattagtgatgttgagcattttttcatatgctgcttggccatttggatgtcttctcttgaaaaatgtctattcttggcctttgcccactttgcccagtttttagttgagttgttttgctgttgttgttgagttccttctagattctgatattagtaccttgttggatacatagttagcaaatcttttctcccattctgtaggttgtatgctcactctgttgattatttcttttgctgtgtagaagctttttagtttaattaaatcccatttgtctatttttggttttgttgcttgtgcttttgaagtcttagtcatgaattctttgcctattcaaatgtccagaagagttttccctgggttttattctagtatttttatagtttcaagtcttacgtttaagtctttaatccatcttgagttgattttttaatatggtgcgagatacaggtccagtttcattcttttgtatatgcaagccagacttcttaataagaaagtgatacttagctgcagtttgaaggatgaaacagtttgaaggatgaacactgaaaagaggggaaggaaaggctttctgggctacccaattctctctgcatttcccagtcctgagggaatgtcattgctctaagttctccttttatatacacacacacataggttgcctgtggactgactgcttcagattaggtgcccacctttggcccagagagctgtggctgggtgagggagagttcctgggtcctgggctccttaacaagatctaagcaagtgacaacttcacttactggaactatggctgtaataattcatttcggggacacgctgctgcctccaagaagcttccctagttcccccaagcaaagtgattgctcccttctcttttcttctcttgtatcttatacctgcttctgttggttgcacatatcccacagattgtttcgtttctgttgttaacatgactctctgcctcccaagtaggctgtacttcttgaggacagaaaatatgtcttatttatgtctgttttcctagaatctagcatagtgactgtacagtgcctagggtaagcactcaataaatgatgctgaatgaatgaatgaaatgacaaactgctactggagtacttctcaaaaatgaatgaaataaagaacaggagagtaggcactctatcccttccttctctttctcttcccaagtcaccccacaaatatgtgtcccattcaacatttctggtacacatatttggcacatgtgacatatgctatatggacaggcaagtgtgatggcaaatatataccagtcatggaatgcccgtgctcagcaaatacctacatggcattttagagccaacccaagtcctggcatttggactgggattgagtatggaaatactataggaaataaacagcaagatcttatggtgcccaccagtggtgcagatttgaagtaataatacagagtggggggaaatagcactaattaagctgaatggctcaaagagcaataccctttctcaaaccaattctgtaacagacctggttcttcaattttctattgttggctcaattctaactgtgctgagattccatccatttctgaagtggttttatttggtgagggaggaatgcaaaatgactacttggcccggttttcaggtcccacatgttgtttggtttttgttttgttttattttggattttgttttaaagagtctaaaagggcttcattacactggaatctaactacctatttattttctttactgcttccattctgcctgaagttagttaccataataaatgttgttctccaagctgtgcatatattatccatcactgctaggaaacaaagaaagatgtgttttcctgagaagactgctgttgttaaacaaagcagcaggtgtcttgaatcagaccgtgtgggctgattaaaacactgtgattctcctcctgactttgcctttcatttcttacacttcagctcctacttctgattagaccaagtatgtccttgggagttacgtgcttagaaggaaaaacatgtaacaggaaaaatacctacttctctataattgaggataataatgttcagcttggttcattaacagggtatccttctggtaaggagtagaataatccttctatctctttcttccagattgtattctggcagtcacagccctcaaagacctgcacgagaaccctttccactagcttcttttggtggctgggagtttctctcagggtacagtgatacatgcaatatgcattcatcaaactaaaatgtgttgaaccaagcctcctctggtccaggtactgtacccaggactcgaaggatcatcgactgccaatcactttttggcaccatacatttgtgacttctgcaagatggaaataaacagctgtgcatagctgaaaatggcctcactctgttgctcaggctggaatgtaatggcacaatcatggctcactgcagccttgacctcccaggctcaggtgatcctcttatctcagccttcctggtagctgggactataggcatgcgccaccacacccaggtaattttttgtattttttgtagatatggggttttaccacgttgcccaggctggtcccaaactcctgggctcaaacaacctgcctaccttagcctcccaaagtgctgggattacagacatgagccactgcacccagcctatctttataacttctttggtgaaatggcaattcatatctttccgtgttttatactgggttgtgtgtgttcttattattgagtttcaatagttcttcatgtattctggatacaattcctttatctgaggtgtgatttgcaaatattttcttcctgtcggtggc

SEQ ID NO: 3182 - DNA, 1433 bp, Homo sapiens
gtgactgtccagatctggagcattctgaggacttcagagggctgcctgtgcattgatgaagagcataagaaagaagacaatccttgctgttctggggagacctcagggatgttcccaggccacatttccagacacaagaccacagaaccccagccaggagcggccaccagcttttgccgggggcttcaaaagcccacgtctgcatcccggctgcgtccccgcaagaactgcgtgctgcaggcaccatctgcgccgagctgggactgagccggcctggctcccctccctttcagcagggcagccccacaaaggagagggcctgccagccccaggcagtgcagagctgggagctgcagactcactggaggctctgggaagctccaggaagggatgtggaagccaggtgttgaagcgtttttcaagcaagtgacaggggcatgggccagcttggtggccacaggaccacaggactgcaggacctcgggtgcaggtcttaaagtgcctttcaagcaggttacagggcatggacaagcttggcagccacaggactgcaggacctcgggtgcaggcgtggatcagcttggcggctgcaggacctcgggtgcaggcgtggaccagcttggcggctgcaggacctcgggtgcaggcgtggactagcttggtggctgcagggctgcaggactgcaggacctcgggtgcaagtgtggaccagcttggcggctgcaggacctcaggtgcaggtgtggaccagcttggtggctgcaggacctcggttgcaggtgtggaccagcttggcggctgcaggactgcaggacctcaggtgcaggtgggcatttcattatcatcgctgctgtttgcgagatgatgcttggggtggttcaagcagctgccgggacatcatgaaggagggattccacctgtgccaaccccacccggctgtgtcaggatcacctggggcttttaacagtgcccggactccagcccagaccaatgaggcctaaatttctggtgatgcccaggtgtgagcatttaaaaatatatatatctacaagagattccattgtacgactaagattgaaggtcattgtggaatttccgtcaggaaaatggccctgagttttacagaggtcactttggggttggtgcagggcatggaccaggcgggaagggctgtggcagaggtggggccgtctgtcgggcggcactgaacgcccaggcggctgccttctcttctacatccagcctcctgctgcaaggacacagaggcccaggacctcctcccagcacctgagcaccaccctgcttttgcccatggacacggaagtctccagctcccaggccccctttgacatcgtcaggtgtgccaggccttgattcatctagcctaaaacacagcgtttagcaacagttcacttgaaatataaacaaattcc

SEQ ID NO: 3183 - DNA, 1062 bp, Homo sapiens
ccagcctcctgtctgctgagcaagtgtggggtcattgtctcatttatttccctacttctccttcctcggcttgcaaatagtggctctggcctctccactattggagcatgagaagacatgagatgagagctgctaatgattgacagatgcggtggtggttcgagaagttttgcaaaggagaagagagccttgaagatgaggagtgtagtggcaggccatcggaagttgatgacgaccaattgagagcaattatcgaagctgatcctcttacaactatacaagaagttgccaaagaactcagcatcgaccattcgacggtcatttgacactggaagcaaattggaaaggtgaaaaagctcgataagtgggtgcctcatgaggtgagtgaaaataaaaagatcgtctttttgaattgtcatcttctcttattctatgcaacaacaacggaccatttctagattgtattgtgacatgcaatgaaaagtggattttttttcctttctctttttttttttttttttgagatggagtcttactctgtcacccaggctggagtgcagtggcatgatctcagctcactgcaacctctgcctcccaggttcaagcaattctcctgcctcagcctcccgagtggctgggattgtgccaccatgcccagctaatttttgtatttttagtagagacggggtttcaccatgttggccagtccggtcttgaactcctgacctcacatgatccgcccaccccagcctcccaaagtgctgggattacaggtgtgagccaccacacccagcctaaaagtggattttatatgacaactggtgtcaaccagctcagtggttggaccgagaagaagcccccaagcacttccctaagccaaactagcacccaaaaaatgtggggctactgtttggtggtctcctgccagtctgatcaaccacaactttctgaatcctggcgaaaccgttacatctgagaagtatgctcagaaaactgatgagatgcatcaaaaactgcaatgcctgcagccagcattggtaaacagaaagggcccaattcttc

SEQ ID NO: 3184 - DNA, 809 bp, Homo sapiens
atttgtggtatattcatcccatatattgataatactataaaatttaagttcatacaatgatatgaaaaaatctcagagacacaaatttgagtacaaaagctagatatgagggtgcatatgctctgcaatttctgtcatataaaagcaaaaatgaaaaaagctaatcaatggttatagaagtcagaataatgtttattttaggggggataacatctgggatgggcctgaggcagtcttttggaaagctggtaatttgctattactcaatctggatggtagttacacagatgtgtttacttttcaataattatgaagatgaactattatgatttatgcatttttctttctatatactatattttaaaataaaagaaaatgaacaggactattcttcctcaaacaaagagatcgtgtgatgaagactcaccagagctgttctctataagcttgaagagcaatggtatcaggtgcttttttttctgaagctttggtagtgtaactgtaagagtcctggaattggaaaagcaaatccagaagttgagttccatgacttttttgctgtttgcctttggacttgcatcatttatatttttaattcatcgaggatgagaaaattgattaacacaaaatcttttcatgtcttttctgatgagagactagctgaatccaagaagagaagcccttgaagagtgtattctattctagacaagcattcacacattggcttctttggtgccaggtaattagaatttgtaatttggtcttaattaaactgcagactacccaaaggccttgatcagtggcctttt

SEQ ID NO: 3185 - DNA, 3405 bp, Homo sapiens
cagagcccggcagaaggctatcgaagagtgtggccccagagggaacccctcagcccttccttccccagtcatcctgaccctgtgccccaactcgttcctctcccagggaaccaggtgttcccggaggtgaccaggctcctcaccagccacactggcaataccagcaactccgaagacatcttgtcctcggcctgctacactgtgaggaacctgatggcctcgcagccacaactggccaagcagtacttctccagcagcatgctcaacaacatcatcaacctgtgccgaagcagtgcctcacccaaggccgcagaagctgcccggcttctcctgtctgacatgtggtccagcaaggaactgcagggtgtcctcagacagcaaggtttcgataggaacatgctgggaaccttagctggggccaacagcctcaggaacttcacctcccgattctaagaagagactgtccaagcaagttaggcttgcaggaagatatgacccagctgagaagccctcaggcctcgctggatggggttttctgtccatcctatgcagtatttgggaaagttcacaagaaactgagaagaaacctaaaaactgtggatagtggaaagatttttagattttttttttccttggggaaactggcaggcaatgggggttagggaggttggggcggtgggggctttcttgagttaaaggggcttatatgtgatgtcaatatttcttcctctgagaaatggtatatatatgtgtataatgtaagtgtgtgcatgcatgtgcgcgtgcatgtgtgtgtgtgtgagtgtcttaaagcataaccacaaactgcaaaaagctaggtaagctattttgttgcagctcataaggtggtgaaaaggactctcctgtgtttcttactcataggcaaggacaacatgtgctttttggtgagctgctcataattcctgaaatgtgtggtgccagggcaagggggccatcactgcagtcaggccctcagaggagtcctgcaggcttcctaccagtggtctccaggggtgcaggagtaactggggctgggccagcctccccacttacaaggctgctttccaggaagggaggtctggtgtatctcatgggagaatctggggtgtctgtaatgtcacccctccagcagcgccacaaggactgaggttgggtaggtgtggggttccagaggacagcaggacactctcgcatactttgccaaatgaggcctgctcagaggagtaggagctgaaagatggtgccttccaccctcttgggctgtgtgcccatcagagcaggctcagcctgcaaaggccctgcattcagaggtcttgtaatctacttgttgcaggagaaagaaggtaaaaaatgatttttttaagaaaagctattttattgcagctctttcccaagagctgttctgggaatggctggtcttcatattcccagtggagaggggaacaagtggggctgggcatatacctattccggcttctagtgggatggagttggggtatagaaattaaccaggaagatgtttccaccaagcctgctgtgagtcaattgagggagtgtttggggtcccaggagacttggacggggggagtttgggtagactaggaaaggaaagtgccatatcagggtaccggtaccggcaagctcacatctcagccaggggccatgccccacttcccctgaccccagctgtcttgtctccactctgtgaaacccacaggggatgtgataaacagggctattaggggtatcagccacgtcgagcccccagactctgtgcacttcagaccagcagcagcaggagggctcccgagggccttatgagaaaacctgtgtggacatcccttggtgtacactaagacagagcagagcccagcgctcccaagccttcctccttccagcttctacctccatgctagcattgctggtgttagagaggaattaacttcctggtctgtgcccttctctagaagaatataagatgctcctcctcctcaccccttctcagcctcctcccaagtcttcctcttctgcaccacccccgagtccaaacccacctcttgccccagcattcaggctggaaaacactgatgtggactcagtatgataactgagatgggggacgccagacatgtgaggacgctgtcctccgagaggtgtccccggctgttagccagctgtgctgtggtgctgtgggtctgtcataccctcccttgcttctgttcacactgggaggcccactcctggctcacctctccctctcagggacccacgtgggagcctggatccctggactgtcctgggcataggtttcaggggcctcctttgttgtcatcagaacccagaggaattcttctcctaaaaaatacgtatggcataccaatctgtgcggggcagtgtcctaagcacttagactacatcagggaagaacacagaccacatccctgtcctcatgcggcttatgttttctggaggaaagtggagacacaagtccttggctttagggctcccccggctgggggctgtgcagtccggtcagggcgggaggggaaatgcaccgctgcatgtgaaccttaccagcccaggcggatgccccttccccttagcactaccctggcctcctgcatcccctcgcctcatgttcctcccaccttcaaagaatgaagagccccatgggcccagcccctgccctgggaaccaggcagccttccagacctcaggggctgaggcagactattagggcagggctgactttggtgacactgcccattccctctcaggccagctcaggtcacccgggcctctgacccaggcctgtcactttgagaggggcaaaactgagaggggcttttcctagagaaagagaacaaggagcttgccaggcttcatgtagccgacacacgtctcaggattttaagtccacattggcctcacactaccagggccaatgcccaaaataaggagttccaatttggggccaaatgaggaaggacacagactctgccctgggatctcctgtgctagcggccaatgacaaatccagtcattggccaccagccacctctgcagtggggaccacactagcagccctgactccacactcctcctggggacccaagaggcagtgttgctgtctgcatgtccaccttggaatctggctgaactggctggcaggaccaagactgcggctggggtgggcagggaagggaagccgggggctgctgtgagggatcttggagcttccctgtagcccaccttccccttgcttcatgtttgtagaggaaccttgtgccggccaggcccagtttccttgtgtgatacactaatgtatttgctttttttggaaatagagaaaatcaataaattgctagtgtttctttgaacttt

SEQ ID NO: 3186 - DNA, 11424 bp, Homo sapiens
tgttaaccaactattgttaaattttaagggaaattgggtagcatggtcttaggtctgattataaatgtttgtcttttttgggagcctgtgattttttcaatacaaagcagcttttaaaacatcttgtgagaacggtatttaggaggagaacaaaaaagggaattctgaattgtaatgacagatgtaaacatgtctttcattagggttcactttggttttctttttctttagtggtttttggcaaatttgtcatatcaagaagcactttcagacacacaagttgctatagttaatattttatcttcaacttccggactttttaccttaatccttgctgcagtatttccaagtaacagtggagatagatttaccctttctaaactattagctgtaattttaagacttgataaagaaggaaatggatataaaatattgaacttcattggaggcgttgtactggtaaacctggcagggtctgaaaaacctgctggaagagacacagtaggttccatttggtctcttgctggagccatgctctatgctgtctatattgttatgattaagagaaaagtagatagagaagacaagttggatattccaatgttctttggttttgtaggtttgtttaatctgctgctcttatggccaggtttctttttacttcattatactggatttgaggacttcgagtttcccaataaagtagtattaatgtgcattatcattaatggccttattggaacagtactctcagagttcctgtggttgtggggctgctttcttacctcatcattgataggcacacttgcactaagccttacaatacctctgtccataatagctgacatgtgtatgcaaaaggtgcagttttcttggttattttttgcaggagctatccctgtatttttttcattttttattgtaactctcctatgccattataataattgggatcctgtgatggtgggaatcagaagaatatttgcttttatatgcagaaaacatcgaattcagagagttccagaagacagcgaacagtgtgagagtctcatttctatgcacagtgtttctcaggaggatggagctagttagctgtctgttgtctgtagcccagcttgataatggaactatacagcgaagagacaatctctgcactttgctatgtagctgtgtacatatcactacagttataggaagtttcagtctacagtccatccaaaggaccaacctgccttacacatctcaaggaattcagctgttgaaatcatttgaactaatcaaggaataaatcctaatgttctgggactttattttcacatgttaaatgctggaatatattatgaaaatgttttcaagaaatcacttaagtgttcatagaccagtatttctgacaggtaaaatgctaaaataagctacctgtaataagtgtggattatatttttgggttttgtagaatattgcaaattaaccacacaaaaaatgtttaatttatgcaacaagcatgtttgtgcaaatttcatgggactttaaaaagaataagtatttgagaaaatatctggttcacttacactacatttactgtattattcttttatagcattaggtgccttgtattttaaatctgtgacaaaccatggcaaatttttaaaggggaagtattattataaaatgaagaaatatgtatttctaaaggctatattgctgtaaacttaattgataaagctctgtttaatttagagttttgaagaaatagtctcccttcaattaagaaattttcataatggaatgatttaaattgaagtgacaaagagtattattaaaatacaatgtttatacgtctatttgtgtattgtagatgtatcaagtgatttctaatttttttcacatatgaatgtgccagattactctagaactagatgtctcttctttaaataattttagttttcctgaataaatttgtaatggttaaagtaccaagtaagtaaggcgagaagggattctgtttttaaaatcacatcagaacttttcctctactaagattataaattaaatgtaaaatactcctaattgcaattcttaaacttaggccttacatgtacttattatgcaactgctcctggactctattcaccatagatatcagtaaacgtatgtcccaggattcacaggcttttgattaatcaatattcttttcaagtttgctgtgaagagtttagttctcttcaaaatttcttaactaatctgatttttaagaattctctttgcagtgtttagcttcctattcacattcttaaaattgctttggtgttaccatgagtctaaaatgaagtttagccttccttttgtttcattctgagaacttctatattatattacctttaaaaattgtttatgatattaaatttaaaatacaaacagctctctttttttttttttttttttttaatcatccagcccaaagtggcaaaaacagctcttttctcatttggcaccaccaataacgcaagttaaaaataatgttgagtttattatacttttgacctgtttagctcaacagggtgaaggcatgtaaagaatgtggacttctgaggaattttcttttaaaaagaacataatgaagtaacattttaattactcaaggactacttttggttgaagtttataatctagatacctctactttttgtttttgctgttcgacagttcacaaagaccttcagcaatttacagggtaaaatcgttgaagtagtggaggtgaaactgaaatttaaaattattctgtaaatactatagggaaagaggctgagcttagaatcttttggttgttcatgtgttctgtgctcttatcatcacacaggtcatgtgttgttactcaggattctggaagtactaagccgtagttaacaggctggatagatcttcagccaatcttctttcattatactgctgcttttctgtttcttaaaaaacaaaaatcaatgaacaacttcttcagaaggaagcaccactgttcaattggttaactgaaagtatgaatcactgccgctttgcttgcccacctgtttgctttttctcacaggttttatttatctgaatgattgttgcatttgaatactgtagccatggtgagtgagcagttgaagacttcctttctgcaccttcatagttaagggttcatcttctcaagaaataaagttgtgctgggttgtttcaattctgtagatcacctagaaactaggtaacaaggcccttggatcacaatgagcacattgcaggtctttggaaatgctgggaaggggttacattcaagtaactgctgacgtccttcctctctgtcagacccatgttggcctgtaattatatttttctgaatctaaaaacaaatagaaatttctgatatcttttcagtctccttcttttctttccattcatcacttaaatctcattattgtataacgtttcaaattatgacctggattgaaggaagtctgttttgtcagggactttgttaggtgaacatcagaatctcaactacaacaaagctgaaaaatgaggcagccttaacagtaaatgcttttgggccgggcgtggtggctcacgcctgtagtcccagcactttgggaggccgaggcgggcggatcacgaggtcaggagatcgagaccatcctggttaacacagtgaaaccccgtctctactaaaaatacaaagaattagccgggcgtggtggcggcgcctgtagtcccagctgctcgggaggctgaggcagcagaatggcgtgaacccgggaggcggagcctgcagtgagccgagatcgtgcccctgcactccagcctgggcgacagcgagactccgtctcaaaaaaaaaaaaagtgaatacttttgaaatgaatgctttttgaagcttagaagaaccattaggtttatgtaatgcacccatacttattcctttaaataaattttaatttaaaaacattgagatattggcttctgtcaacctgatttaattaattctttacattaagctgattttccccctggcagctgacaaataagttcattgttcttgtagaagtgagctcacaaggttaaatgtgaatgttctcaaaggtacacagccttgtttcagaagaattttaatgcccgctgtaaaatcaatcatgcagagccaatttgaggtatgactccagggtatgcaaggtatgacttctctggaagccaagtcttttcacagggcactgtggtaatacccatagcactaatcctcagtgtgctggttgaagaaataaaatgtttttaaagaaggataaaggaggaattaattagaaaatttttttccacatattagcaaataaatgaaatgtcattttcatattaagtaagtatagttatgatcttcgtttctacctactctccttttgaaatattctttattactaaataatattttaggaggagttaacagaaataattacctgtaacatctgcagataaacttacatagctaacattgtgtgctgacttttttaaatggtgaagtggcattaatgagatgttcagtttacagaatttgaagtttgagttctattttaatagtctgccgtgtcccccaaatcccatttagataaattgaggttgatttttcacatagacttgcaatttttagacaccacattttttttatagtaacagcctcatttgcctgtacaataactaataatacagtatttcataggtacattgtatgtgcacaggaaatttttctttaaatcttaagagcctttaataaacgggatattttaatattttaatgttactacatttaaaaaatagtgttttcctacaaaattttctgtattcagtatacgttaactatgaaaatgtcaaacaatgaaatcattgaaatatatttaaggaaaaattaccaaccaaaagtaatgagtaccctctatgtgcatatttactggaatgttcatgtgaaatggtaacatttccaataacagcattttgaatctggggtgacacaaacatgatttttatttttgagctagggattttgatggagaagcacctagatgaagacaccatttcattcatgatattttaaaattagaaaagtaaagcttctaaattgaaactcttaacaggtcacttcatgaaatttttagttttaaatttaattttacatgagatgtctttctgaagagctacttttattaactttcacttagatcgttgtatgctaggcattcagtatttctctacttgattttcctatgcctagttgtgattacagcaagtatttaataataaagtcagtcatgtgagagtatccattaatttcagtgggtccttggaaggcaggcagaagatttctgtccaagagtcttatttttgacatgagatgaaattctttttttttttttgagatggggtctcactctgtcacccaggctggagtgcagtggcaggatcttggctcactgcaacctcccaagctcaagccatcctcccacctcagtctcctgagtagttgggactactggcatgtgcccccattcctgattagtttttttgtatttttggtagagatggggtcttgctatattgcctaatttttgtgtttttagtagagatggggtttcaccatgttggccaggctgctcttgaactcctgagctcaagtaatctgcccgccctggcctcccaaagtgctgggattacaggcatgagccaccatgcctggctaaaaccaattctttagattgtttttgccaccatttgcttacttggaatagctttcacatttatttttcttatgaagaaatccagtgtcagtcagaccatgtaacatcaaagcaaaatttcattgaagcctatccttgtcttaattattctaaaataaagtacaataaagtgaattattttgccctttgtagtagcatagtgttaagttatatatatattttaatatgcatactcctaagtaaagtttcagagaccacatgctggagagcagtggctttcagacagcatcagcatcacctgaaggccttgttgaatacacattattggaagagaggggagaacacaggctcatgcctgtaattccagtgctttgggagactgaggcaggaggatcacgtgagcccaggagttcaagatcaggctgggcaatacagcaagacccctgtctctacaaaaacaaaaacaaaaaacaaacaggcatggtagtgcatacctgtagtctgagctgcttgggagtctgaggcaggaggatcacttgaacccaggagttcgaggctgcagtgagttattattgggccactgcagtccagcctgggcagcaaagtgagaccctgtctgttaaaaaaacaaaaccaaaaacttgattgctgggggccaccctagagtttctgattcagtaggtctggcggtggggatggtgggcctggtaatttgcctttctaacaagcgtccaggtaatgccccagctgctggtcccaggaccacactttgcagattattactctgagaagagcactaactctgacgttggattccttctgttcctcattagtgaatttatttgggggagattattcaatctggtagatccgcatttacttagctgtgaagtggaggttaatgcaacctgcctgagactgtgagaatgagaaactctaattgaaataccaggcccagcgtgcctggatgcttgaaaaatgctgactcccatggtccgtccttccctcactcttctcagctataaagtgagaagcgaaattcagtatcttttaagattcctctcaggtgtaaaatgctgtgattctaaaagtttaattttgtagttccagagacaatgccaaacacctgtgtgtgcttagtgctttgtaaagagtggtaataacagtgacaccacataggccgtagttttgtagttccagagacaatgccaaacacctgtgtgtacttagtgctttgtaaagagtgaataacagtgacaccacataggccatagttttgtagttccagagacaatgccaaacacctatgtgtacttagtgctttgtaaagagtggtaataacagtgacaccacataggccgtaattttgtttttgcttttgttagggtgttcagcatcttgactccttaaataaggttttcagtcagatttataaagcagcattgaagaagttgtattatatttgagtacagttggaatccatggcagttttatggaggccaaatatatcagatgaataggctaatttccctgagttgctggccttattagtccctactctgttgccccctggttacctaatgcatgttcaaaaggtatagttttcatcacctgcttgatcttgattttcagacagcatcaaatcagttgcaaaacaaatccaagctaaaattttgagtgtatgattaatttactatagcatgtaattatgcagtattttattttttattttttattttttttgagacagagtctcactccattgcccaggctgaagtgcagtggcacgatctcggctcactctaacctctgcctcctgggttcaagtgattctcctgcctcagcctcccgaatagctgggattacagacatgcaccaccacgcccagctaattttttgtatttatagtagagaggaggttttaccatgttggccaggttggtcttgaactcttgacctcaagtgatctacacgcctcggcctcccaaagtgctgggattacgggtgtgagccactgcgcccagctatccagtattttatttaaaagttgtcactagggtgttcactattgtgaatttataatcttaaaagttggggatgctaaaagtaccagactaaaatactacgaggttttctcatcttttaattccattttgttagaaaaaaataatcacaaccggggttcttttacctttccccagccatctagactgctttactgcaatgttgggaagattgcatacaataaaaactgtagctagttgattgggatttgggaaaattgaatcaagcatttgcattcatccagaatggtcttaaactgctgactgtggggtgcccacaggatgagcactggtggcatgggtgggaggaatttccttggatactgcaattgcatttgaaagatctattttccaaaacctgagcagagagaggctaggaggaatgcagacaggacattgaaaatgcgaattccctttactagtagaacatgaaatatctgataatggtttaaaaaaaataagtgccaggatacattgtagtataaaggttcaactagtataatttaaaatgagtctttatattcaggccaggtgcggtggctcacacctgtaatcccagcactttgggagtccgaggcgggtggatcacctgagattaggagttcaaaaccagtgtgaccaacatggagaaaccccttctctactaaaaatacaaaaaattagccaggcatggtggtgcacgcctgtagtcccagctacttgtgaggctgaggtaggagaatcgcttgaacccaagaggcagaggttgcagtgagctgagatcacaccactgcactccagcctgggtgacagagcgagaccctgtttcaaaaaaataagaaataaaaagtgagtcttcatattcaaattagtatatgaggttaggcaacaattcttatatgggaccaggtatatttaatttgcctttctttgcagtcatcctagtaaatccttgtaaagggttattttatatacaattttgtagtatattctaaatcccctttggcaaataaagctgaagttatctagtgtcagcatactgtgatttgtatatttatataagacaagattgcatcattctgattaagttgcagcattttagttttatctgataggcctgtattgagtaatcagtagctatgtgcaaatattaagtcaacttaattaccagacccagaaggccagaggtaatcaaagagtactttcggaagatgaaatatttataatgagttatggaaacaatgttttagaaatgtttttcttggtgtaatttaatgcagatttttacctcaattttgttaaaaaacttgataatttgatccctccatctatttaatatttaatattttcagattctagagtatttaaaatttaaacacaattataaaattaattataattcctacttatgttagctatgatttagggccaaaactaccctggttttgtcttgcaacttgaaacattgtgtattttaaactatataatttgggaacattattttatagactgtggataaccaaatataagatttgtgatttttaatgcttcatttgtgtaaaatcatttgtatattctatttatagtatgcattttctagctcattaaaagtacagaaaaacctcaaatctgtccttatacaaatatttgatttctagtttccttttattaaaacattttcactcattcattctttcacaccttagtctctaagatgtgtctcgggtatttgataaagtaggtcttcttgtggagcacatcactcagctttggagaccaaacattaaacacactgagttgcatcttatgcatgttaaggtctaaagccaaaaggtgaaatttttgaataatcaaattgcccttgggagggtcctgaataagagacctacattccatctcatgataagtcccttccattgaacttttcctccaaaattggaatagaaattagcaacagcagaaagccaatgctatccctaggatggtggggtggagggaggaagccgtcataaagctcaaggccagggtcacccagaggaagcacaacccccgcagcagagcacaggggccttcagggtgctgcagctggaggcaaagaaggagggaaagaaatactctcgctttgctttgctttttgccattgactcccggtggcaggagctgactggaagccagctggcacaggagcttggagcttggtggtatccctctggtgtcgactcccctgacttagagcagagccgcagacctcaggtcaagcaggctcagaattggcacatttgcactggggaccatattgtatggacaacacttactttcaacagtagaatcacagcctgcgaagatgtcacagtacaagaaatattctggaaccaagatcacctttatccatgtcaagtccactccagaaagtggaattaggggaaagtacctgccctggactagtatttcgaatcccttccctcctctacttactcccctttccctttttcttctcccaagctgagctaaagggaaatgtgaagaacattattgcctctttaaaaccaaacatatataaaacatgaaaaatatttttcagtgacaaaagataagaatgaaagcattcaggatagtgtattcatagaagctttgggaaagagtaaaaataatttcttaaatttttttcttgaaagactgaaaatagaatcttaaggagatagtgttcttaaagccttgatctgactacttgactacttataacttctttcttcatctactaattattttgaaaagtcacttagtcatttgtcaatcctaacctttagagataaacatttaaaatcagttcactaatcacagcatttttttttttttagatggaatcttgctctgtcgcccaagctggagtgcagtggcgagatctcgggtcactgcaacctctacctcctgggctcaagcgattctcctgcctcagcctcccgagtagctgggactacaggcgcacgccaccacacccagctaatttttgtatttttagtagagacggggtttcaccatgttggtcaggatggtctcgatctcttgaactcgtgatccgccctccttggcttcccaaagtgctgggattataggcgtgagccaccgcgcccggcccacagcatcatttttcaagggtctctagggtgaccaggtgtccgggtttgccaaggacagtcccagtttctacctgctgtcctaggacaatcatgaatagtgcccctttcagtttcaaaagtgtcatagtttagacattaaattacctgaccacccttatatgccccatgtttcttaacatctaggctgctgacaaaattcacattttctgactgtcagtctagtgttctctatactagactgatacggatccacaaaggaagcaatattggccaacaattaatcttcagtctttggattagtgagaggtgacaacgtgctggcagccgtcacagccctcgctcactctccccgcctcctctgcctggtttcccagtttgacggcacttgaggagcccttcagcccgccgctgcactgtgggagccccttcctgggctggccgaggccggaggcggctcccccagcttgcggggaggtgtggagggagaggcgagggcggga

SEQ ID NO: 3187 - DNA, 534 bp, Homo sapiens
aaaaaagaaagaaaaagaggttcactgaaccctcagttttcccaatcacttaggataaggacaggaggaattaacgatgaatggcagaaatgtgagtacttaataatgtaatgatataatctcatcatagctaatagtttttgagcatgtattatgctagtagatttatatcatttaattttcacaactctttgtggatgctattattaaccttgttttacagatgagaaaactgaggcccagaaaagttgagcaacttgcctgaggttacacagatactgagtggcagagctgatatttgaacctatacattatgtctccttagcctatatccttaaccactggattatccaaaacactatggcagtatttcagtcaggacatcagatttaaaatcatagtgagagaccggtaaacacacatgagaatggctaaaatgaagaagattgacaataccaagtttgaggaggatatggagcaactgggactctcatgcatagctggtgagagtgtaaatacatgtaaccactattg

SEQ ID NO: 3188 - DNA, 3647 bp, Homo sapiens
cgtgattactcttgctagcacttctaatagtatgttgaataggaatgaggagagtggacatccttgtcttattccaagaggaatactttcagcttttccctgttcataatgatgttggctgtgggtttgtcttagatggcttgttattttgaggtatgttccttcaatgcctagtttgctgaggatttttatcataaagggatgttgtattttattgaaagcttttttgtgtctattgagacaatcttatggtttttgtttttagttccatttatatggtgaaccacatgtattgatttccataagtgtaaccaatcttgcatcccaggaataatgcctatttggttatgatgaattaaattcttgggccaggtgcagtggctcatgcctgtaatcccatcactttgggaggtggaggtgggtggatcacctgaggtcgggagttcaagaccagcctgaccaacatggagaaaccctgtctctactaaaaatacaaaattagtcgggcatggtggtgggtgcctgtaatcccagctactcagggggctgaggcaggagcatctcttgaacccaggaggcaggggttgtggtgagctgagatcacatcattgcactccagcctgggcaacaagagtgaaactccgtctcaaaaaaaaaaaaaaattgatgtgttgctggactcaatttactagtgttttcttgaaaatgtttgcatctatattcatcagggatattggcctgtagtgttcttttattgttgtgtctttgcagaacccacagaagacttccatgaagctcttgcaatataaaagacccagaactcagccccacttctggaaccttgctttcagaccttgcattctgttgcaccagtggacaccgcacagaccagcaatctggctcagccaattctgtgattccacccagcaacacaagacagcaggcaaggtccagctctgtcacccacactggacttcggtggtacaatcctagctcactgcggcctcgaacttctgggctcaagtgatcctccaggtaaataaagaacttggcatataaaacaggtttattgaaagaggaaaaggtgaactaataaaaaagaagcataaaggtaagtatttacagaaactctgtttacatttaggagtcataattctttttataattaaaacaatttacaatcacaaaactgagattagaagtgcttacatatttcacgtgtaataagtgtttattatttatgaagaaaagtcttgatatgtgtaacattacattcactcattagaaattgactatgtgtttaagtttccaaataatacattttcttttcacaaagtcattttcctaaatgaaaatctgagtgctagcctagaatacaagagtgcatagtttaaaaataaagataaatcattattgtttaaaaatcaatttgaaatttctgggggaaattgaatcattgctgcaattcatatctatcaaaaattgctggtttctccagaaggaaaaacaaaactgacagatttgaaggcgatctctgtataggaatactcaattacattcttctgctcactgcggttaatcatattttaaattgtcatttaaaatcttgtaattctgataaccttatgatatttaggcacatataggttaaacattaacatacaagaaatataatattcactgttcttataaagtacacaaattttattcttgaaaattgtatttgaaattagtaaatttatgttatatattcagttcttatgctagttaatttctgtcaaaagttcaggagtttttgatacaatgaaaagttagtattttaaaaatatatgtatgctagatatcacaggctataatattaagaactgtagttgaatatgaatttagaattttcgttacaacacatcacccagtacattccagttttggtcaaagcgcattgaaaatctgtgaccacattttttttaaatatagaagattttgaaagcacttaaaggaaagctaaacaaagggtatgtggctagtggatgtgatttttaaagcgttgttagaagaacatatcattgatttagactttgcttggtgtctgggccattaagaatcatggattacattccatgggacctgtgtaaactaacagcatcttatggaaatgcttttattcctgtcaatatcgcatgttaaaactaaaatattattacagggatactcaatctaaaaaatgcttagaaaacaaaacaagtttggttatcacctcacaatcgacagagtctacctgttatattcatagtgagggacagagtgaagagtcataggtttccacaacttaaaaaatctatttcaaactaggcattatttacagtcaaagacttagagactggtacctgactctgagatgactgcccttaacataaaaaaatagagttctcttatcctctgggaataatacataaatcctaccacatacaggaggataacactaaggtttacgtttcttattatgatattgattcaaagttgataagcaagaatctttttgaagagcctgttaggatagctttgttcatatggtttcaaacaatcccggtgggaattgtccctgtcaagatacagggctctggaagccaagtcaattactttattggaaactcaatatagtatgctatctaatgctgttagggagaaacactacctgtggttttccagtttttgtgatggtgaaagatgagcaaaagaggagagagataagtcagaatatagctgcagccatatttctaaatatatccctgccaagcacagagcagcaggcaaggcccatgccaaggcctgtcagacagatttagccagtaaaatacggcaagccccttttagattcaaacattttattacttggccagaaaaaggaagaacagcaaaaggagacaatgcactgagctctttgtcccccacactcaaaagtgtaaaactcagacaaaaagggctagttgacaatgcagtgaaagggacactgtgttcttgaggactcaatgccagaaggttgttacatatgtttatagactgcagctttaacctaaggggcacggagcagaaagcctcttcccttatcagaacctgggaaataatgagaaacggaggcatgactgcctcccatgtgatataagaaggtgagtaaatatgacctcatggcattttctcatatccttttatgagaaggcttttgtcttccagaaagcccgtaagttgttccaccaaggctcagattagctgtggttcaaacttttgcctacatggcctatatggacacaggcaaagtcaccagaatgccatgatgcaattgtccccctataataccgatgaagtctaaatttccaattgtatactatgtgtcttgagcgtgattttctttctcctttttttgtgatgtttcgtttattcctcactcatcaacacacatgcatgcacatgcattcacacacacagatatatgagaacaaaaaataataaaattgcttgtaaaatacttactaaaattaccatggtgccagtaacaatttttcccaggtagatgaatatatgtaactttacaaccctcaagcttgtgaatcggggcaattataattacattaatataaagaaatttgaaggtc

SEQ ID NO: 3189 - DNA, 720 bp, Homo sapiens
cactgactgaaatgttattatgtgctgcatgaacgcatctgttaaatgtataaactaaagagttgaaacaaatcccatgtttggccaatgtagaatctaagtagaaggaagacatagaactaaatttttcatccttttataactacaaatggatttaaatataatattaagtcttctgttcacatagtacatggttcaaatgtacatagaaagtacatataaatatctggaggaagattattccaggtggagagaactgcaagaccttgtggcaagaaggggctcagcatgactgacaaatagcaagaaggatgtcagctgtggcactggctaccttgacacatcttcatctgaagaaaaaatacaaagaaggcctgccatgatgacaatttacttcatgaagagaacgggttctgaaacggtcattcttttccatttaaacaatgttaccatctcccaaagaacagctttggggtaggaaagaacagtatttcatttcaagctggactactcatctaccaaaaaaccattctgaccaaagaaacagatgcagaattacagtcacagctgcattctgcacagaacaagttggataatgctatactgcattcagttttcttggataaataaatacctagaagtagaggtgctagatcattgggtaggtgtatatttatttaatttcataagaaactgccaaaatgtctagcaacatgttat

SEQ ID NO: 3190 - DNA, 2777 bp, Homo sapiens
ggagtgtcccggggagagtgggtccttgagctcctctgggccttgcttgggacttggtccaggaggttatgggaagaaactggtttagaagctgacctcatgggttcgctattcttatgtaacacttaggaagagcagagacccacgcgattcagtcccagagcaatgttgcggtcaagagaacacagtccagctaccaacagttatttcaaaataattcaagctctttgtttatatttctgaaagaaagaaagaaaaaaaaagggtggcccagctggaaactcggctttaagtcccctttcagggggccctcagccgtacagaatccacctggcaaaaatggaaactgcctggaggccagggctgagggaaggcctggagcagagccggtgcgcgacctcgcagtgagcagggagggcaggctggggacgttcaccacccagaacgcctctgctccccgcaaccctgagactccaggctcccctgttcctccctccgggagaccctgcccgtcctccccgcggggctccttcgcagttcgggggaagggacgggttgcgtcctcgggacctttctctgcagccacagcagcgcatcccagcacctcctccaggagccccgccacctcctgccacccggactttccccacagcgcagcgtcccctcgtcctctcagggctggaacagcggtacccgcagacagtgcaaaagggaagtccctgttgccttcccatgcaaactgtagggcgcttacagctgctgggagaggaaaggaaagaagaaatacaagcctgtgacccggatccaacccgcggcgcacagaccccggctctgggcacccctggtgagcgccttctgcgccagagctccgtacagcaccagcccgcgctctcccccagcttctgttcatttgctgcagtcctgacgggtcagttgcctgagcatccatgctgccatccatacaaacccaggcacgcagagatgtacatcctttacccagggtgacaccatgtggagctgaatccaagtccgggagtctgatgaccgtgtctgggctctgaccgcgcagccgtctcacagtgaaacaaattgcggactggccttgtcctgagtggccttaggaagctgcagtggcctgcagtctcctggccagtctgtagaatttggcaaagatgaggcaccttatagccttacatgttcttatttttctttccttttctcttctttattttcttttttaaggatttgaattagtatatgtaaagtgcttaacgcaggagctggcagagaaagtggatactcagtaaataacagcaattgttaattgtaaaaagcatgccacttatctggtaaaatcccccattctaagcaccctgttaagtagttggtaattcctcacttgaaagaaattaaaaagaatttttgtcagttttttaaaatattgttttattgtgataaaatattcataacataaatttcactcttttaatactttttaagtgtacaatgcagattaataagagaaatgcatacaaatttattaacgtgtacacgggaaaaataaggtgattacccaatatcccatgaggtccagatacttatacagcgttttttcagagaggagggtggaaggcggaatgtaggtgattctgttgaggggcaataaattattattaaggagaatgaatgggtcaagaaacagagagttattcgtaaatggttctctttgaaaatttaataagctggagaaatggattatttttttgaaagcgtctgttcaggtgtggtcacgtgttggttttcttttctgcaatagataatgagataagagggaggagaaggaaaagtaattgttctctttggtgggtctgcagggtcttcatgtagataagggagaggactcttccagcttctgttgatcttgagggactttaattgaaaatactcataccagggagccatattttggggccaagttccctgcgctccttcaatcctcctgtttggaacttccctagaatttcacattatcaacagctgaatcagtgattatggagagatttgggttagaggaaaagaaggcaaagaaggggaaaaaacaaattgggataagcagaaaagaaaaataaataaatatgttgtcccatatcttcttgaatcagtctcttagtcctaagagtagaagcatttggtcaaacagctgtgtccattctaggaggtggcactacagaggggctgggcttctacagctgatgcaggcaagctggtctttaataagaggcatttctatggaaacaaagaaaaacaaaggtttttcttaatgtctggaatagtccataataaactagtttttctagagtctcagaagtatcttcagattgtagtggtaatcttacagattttcctggattatagtttgaattacgtgttcatgtgaacttcctgagtagcccatacatcagcaggcacaaaggctgtgtacatgtgagttgctgtgctgactcctcctgaagtttatatcaagttgtctaactttagtttgcagggcttcaagaaaagcagttttaaattctagtgattccaagtgagaaaaatgagagaaaagttcaaaagcattagtttgaagacttgcagccaagaaagaattcaggatttagtccaaattgtaggaaaataataaaaactcaaaaacaatgggcaagactagaatctgataacaggcatactgtacttgtcttctgaaatgcaatttttctctcccgtttccccgtttttac

SEQ ID NO: 3191 - DNA, 3139 bp, Homo sapiens
aaactttatatcgtgtgaatgaaaagtttaaacattttagacttgcttatgattttgttgtgaagaaatatgatgggttttaataagagcaaatatatgcaacacactaaacttcaatgatctcagtaagtgcaactgagcaagataagaatctagtttctttttctcactctgctccaatctttcagtcaacactgactgcctcctttctataatttgagaatttacaagaaaatagtatgtgggaccttcagtgaactgagcttatgtgattcaataagcctcattcaccctaaatctaattttaccagttaagttcttgataataggcccgtgttccaagacattcttgaaagcactgaggaaatcttttgataatattatctctggtatacttattccatattggatttattttcatttaatgtcacactatcacttataatcctttcaacaagagagagtagttatgtctgactctagactgtgctttgcaaataaaatttcgtaagtatggaaggaggtgccttattcccaaacccaaataaatggagagctatgctaaatgaacactgacacattatttggagttgggatagaatgttctgttacataacaatgacataaatgcaaaaatgatggaggtgctcaaatatctgcatgtagaggatttggaaaggaaggtgatatagtttggatttgtgttctctctaaatttcatgttgaattgtaattcccaatgtttgagatggggcctggtgggaggtgattggatcatgggggagaatccctcatagcttggtgctgtcttcacaatggtgagtaagttctctcaagacctgattgtttaagagagtgtggcccctgtcccctacaactatttctcttgctcctgccatgtgagacacctgttcccccttcatcttctgccatgattggaagcttcctgagacctccccagaagcagatgccagctctatgcttcttgtgcaagctacagaaccgtgagccaatgaaaccacttttctttaaataaattacttagtcttaggtacttctttatagcaatacaagaatggcctagtacagaaaattggtactgaggaggggggaactgttataaagttacttgaaatgtggaagcagctttggaactgggtaacaagcagaggttggaagagtttggagggctcagaagaagacgagaagatgatggaaaatttagaatttattagagactggttaaatggtcatgatcaaaatgctgatagtgatatggacaatgaagtccaggctgaggaggtctcagatggcaatgaggatcttaccggaaactggagcaaaggtcatgcatgttatgccttagcaaagagcctggctgtactatgcccctgccctagggacctgtggtagtttgaatttcagagtgatgatttagagtatctggcagaagaaatttctaagcagcaaagtgttcaagatggggcctggctgcttctgacaacctacacttatatgtaaaagcaaagaaatgacttcaagttggaagttctatttaaaagggaagcagagaaaaaaagtttggaaaatttccagcctagccatgtgatagggaatgaaaaagcttttgtgggagaggaattcaagcaagctgtggagcaaccatttactagagatacttggaaaagggagccaagtgctaatatcccagacaatgggggaaaggcctcaaaggcatttcgaggccttcagggcaatccctcccatcacaggcctagaggcctaggaggatggttttgtgggcttggccaagggctccactgctaggtgcagcctcaggacactgctgtctgcatcctggcagctctggctccagactcagctcaaagggtcttagatacagctagggctgctgcctcagaagatacaagctataaaacttggcagcttccatgtgtggttaaccttgtaggcacagagagtgcaagagtgaatgaggcttggcagcctccacctagatttcagagggtgtgcaagaaagcctgggtagccaggcagaagcctgcttcaggggcagagtcctcacagagaacctctactagggcaatgtggagagaaaatgtggctttggagcccccacacagagtccccactggggcactgacgggtggagctgtgaggagggacccaccatcctccagatcccagaatggtagagccactggcagcttgaaccctgtgcctggaaaaaccacaggctctcagttccaacctgtgagagcagctacttgggctgcaccctaaacatccacagggcattgggagtctaccccttgctccattgtgccttccatgtgggacatggagtcaaaggatataattttggagctttaagatttaaagactgccctgctgggttctggactttcatggagcatgtagccccctttttcggctgatttttcccttttggagtgagaatgtttacctaatgcttgtacccccattgtgtcttagaagtaagtaacttgttttttattttataggctcataaggggaagggacttgccttgtctcggatgagactttggactttgaatttctgagttaatgctgaaatgtcttaagactttgggggactgttgggaagggacacttgtattttgcagtgtgagaagaaactgaggcttgagggcaaggggcagaattgatatagtttggatatgtgtcccctctaaatctcttgttgtattgtaatctccagtgttggaggtgggacctggtaggaggtgattggctcatgggggaggatcttcatgatgatgctatggaagatcagaaaatataaatttatgaactgctataaactgttattttcttcgtgaagatcagcacaacaagatgttccagacttattcaacatattgtccagccagtcctggaaacaatcagttccctgaggacagaattaaagtttagagacctgaatctgggccccaggggtggtcattactactggtttgccactgcttctgtagcttttcagtgaagaggtagttatgtaatatgtatctaaaaaaataaattcaagttatgtattttaaaaataaattcaaggtctatatattttagaaaaagg

SEQ ID NO: 3192 - DNA, 1672 bp, Homo sapiens
agcagagacacagacactggggagcctccctgatataaatctaacacaaatatccacattggccaatgagttacgggactctagattggccaatgacttacgggactctggagcaaccatcagaataggcatctacatcggagcagggatctgtgctgggctggctctggctcttatcttcggcgctttaattttcaaatggtattctcatagcaaagagaagatacagaatttaagcctcatctctttggccaacctccctccctcaggattggcaaatgcagtagcagagggaattcgctcagaagaaaacatctataccattgaagagaacgtatatgaagtggaggagcccaatgagtattattgctatgtcagcagcaggcagcaaccctcacaacctttgggttgtcgctttgcaatgccatagatccaaccaccttatttttgagcttggtgttttgtctttttcagaaactatgagctgtgtcacctgactggttttggaggttctgtccactgctatggagcagagttttcccattttcagaagataatgactcacatgggaattgaactgggacctgcactgaacttaaacaggcatgtcattgcctctgtatttaagccaacagagttacccaacccagagactgttaatcatggatgttagagctcaaacgggcttttatatacactaggaattcttgacgtggggtctctggagctccaggaaattcgggcacatcatatgtccatgaaacttcagataaactagggaaaactgggtgctgaggtgaaagcataacttttttggcacagaaagtctaaaggggccactgattttcaaagagatctgtgatccctttttgttttttgtttttgagatggagtcttgctctgttgcccaggctggagtgcaatggcacaatctcggctcactgcaagctccgcctcctgggttcaagcgattctcctgcctcagcctcctgagtggctgggattacaggcatgcaccaccatgcccagctaatttgttgtatttttagtagagacagggtttcaccatgttggccagtgtggtctcaaactcctgacctcatgatttgcctgcctcggcctcccaaagcactgggattacaggcgtgagccaccacatccagccagtgatccttaaaagattaagagatgactggaccaggtctaccttgatcttgaagattcccttggaatgttgagatttaggcttatttgagcactgcctgcccaactgtcagtgccagtgcatagcccttcttttgtctcccttatgaagactgccctgcagggctgagatgtggcaggagctcccagggaaaaacgaagtgcatttgattggtgtgtattggccaagttttgcttgttgtgtgcttgaaagaaaatatctctgaccaacttctgtattcgtggaccaaactgaagctatatttttcacagaagaagaagcagtgacggggacacaaattctgttgcctggtggaaagaaggcaaaggccttcagcaatctatattaccagcgctggatcctttgacagagagtggtccctaaacttaaatttcaagacggtataggcttgatctgtcttgcttattgttgccccctgcgcctagcacaattctgacacacaattgg

SEQ ID NO: 3193 - DNA, 2847 bp, Homo sapiens
ccgctgcctacgctgccacgccagcttccctagtcgcttcgtgatcggccgctcccggggagaggcggtggccgagcggcggagggaggagctaaacggttacatctggcacttgatccacgcaccccctgaggtggccgagtgtgatttggtgtacaccttcttccacccactgccccgggatgagaaggctatgggcaccagcccagctcctaagtcctcagatggcacatgggcccggcccgtcggaaaggtgggaggggaggtgaagctgtccatctcctacaaaaacaataaactcttcatcatggtgatgcatattcggggcttgcaactgctccaggatggaaatgaccctgacccctatgtgaaaatttacctccttcctgaccctcagaaaaccactaagaggaaaaccaaagtggcccggaaaacctgcaatcctacctacaatgagatgttggtatatgatgggatccccaagggtgacctgcagcagcgggagctccagctgagcgtgctgagtgagcagggattctgggagaacgtcctcctcggtgaggtgaacatccgcctgcgagagctggacctggctcaggagaagaccggctggttcgccctgggatctcgaagtcatggcaccttgtgagcccagcagagccaccacccagcatcccaggctggtggcaggagctgggggagaggactctcccctgtgagactcctccttgtgaagggccagggccctgggcaggcctccagctcggtccaggtgattctggcctctgtggtaggaggcagggagagtaagacatgctctgctgtctcttcctctggagactgaacttgggttggttgtgatgagcagccccttggaggctgtgaggttgcagcaaagttttaagtttaccttgtgtcaagggagcaatgcttggtttggggagtgtgtggggtgggctgtatgaagtagcattttgggggtgggtgggtggatatcttaatttttatttttaaaaaatgaaatagtgatgttgtcctaactgggacaggaagccttgcgagaagggacgtacctatgccccagaaggcaagagaggaagactatttggactttttgtatgattaaggttcttattggacttttccctaggttttttttttttgttattgttgttgttgtttcgttttctagctataggaactatctggggaggggcccagtgggtcctcggccagagccctctctaaggacaggttggggagggttggggagggctgcctgtgctggactgaggcttgtgccactgggcctttctgattttgcctccaaaggagagcgctgtgatacctacatgtgtaaggaagggccttccgtattggggttctgccaaggacccgtattcagggacccatgctcttttggggggacttttcctcttgtcttccctactttattaggacttgccctgaataccattttctaccccttgcccctccattctcctggcccttctgggggtcagctggtctctatgaatatgctgggggtgcttccccataggtctctcccttcatttgtctctggtgggacaaaatactgactcagtccttagatgtagtttcacccaagagcatcttggccctgggaagaggtccctaggctgcagatgctactgactgcttgctaggtagcctctggaaagcattccccatccatcactccccacttctttctgctgtgctgcttccctcccaaactccatttctgtcaccctttttataagacttttcctcattctgtggggccataaacctatttagtctggagccaaagggatgccctatctgaaggaaaggggcatggggtgggggattccatcaaaactgttgttttttgccccatgatttttctttggtcagtaggaggctggattggagtggtgattattcccctggagctaagctcaggagcccgaagggagagactgagactgactcccttatctcttcatattctttattccctaccagatggatttttttttttttttttggagacggagtctcgccctgtcgccaggctggagtgtagtggcatgatctcgactcactgcaaaatctgcctcccgggttcaagcgattctcctacctcagcctcccgagtagctgggattacaggcatgtgccaccacgccaagctaatttttgtatttttagtagagacggggtttcaccatgttggccaggatggtctcgatctcttgacctcgtgatctgcctgccttggcctcccaaagtgctgggattacaggcgtgagccaccatgccccgccccagatggattttacatttgctcttttgtgtttcgctccaaagggttgtcttcctcgccaaaaggagggagggactttgaatttgatatgaatctttaaaaccagaattggctggatatttcccatgattgggaaaagagtgaaatgaggacattctgtaaactgtccctccctaattccaaggatcagaaactccccgttttgctgactcattccataactggagaaagaagctccattgaccgaagccacagggcagcatggaagtttaaattttctctaaaattaaaatgccaaggataaagctggctgcttccaggagggggaagaggagtggggagtgggcggtgaaacttttccagatgaacggaccataaatgtgttactggctttgtgcctgtagctcattttattatgacctatatgctcctgatttaaagagatctgtgtactgtttacttcccacttcccagaatcccttgtatctcctttctcgggaattgtattttctaat

SEQ ID NO: 3194 - DNA, 382 bp, Homo sapiens
ggggactaagagtccatgcccagggaatggtttctctctcttccgctggactttaacaagcaagcacatgacgggcttcatcagtcctggacgagaaagctgagatgaaaataacttgagtcttggatgaaatcagtgaccctatgatatcatcacatctagagctgactctaactggacttccagctatttccaggacatattcaagcagagtttggataaccacctgccaaagatctgtattgggtgggaagttggttcatacctgtcttaattgtccaagattctattcttcacctagattatctctgtaaatcatgaagtgcttactaaaagtattatatccaaatgaatattcaagtaaaaatataaacaataaaat

SEQ ID NO: 3195 - DNA, 12307 bp, Homo sapiens
aggttcaagtgcgcatgtgcgcgaggagtcgctcgggcacttattgagcgccgactgtctacgggcggccggggacagtcttgcactgtttcctaggctggagtgcagtggcacaatcacagctcactgcagccttgacttccccaggctcaagccattctcctacctcagcctcccaagcagttgggaccacaggtaggtgccaccacacccggctaatttttaaattttttttagagacagggtctcactgtgttgctcagtctgatctcaaactcctggccttaagtgattctcccaccttggcctcccaaagtgctgggattacaggcatgagctacctgtgcacagccaattttgtatttctaaggactctataggtagtgctttgaggaggaggcagggggtgcgtgtctgtttaaaaagcagtaacctatgtggttaggagtccccagtgagtgaataataatgttttagagtttgtgcaatgggatgttcagattcttttttctcattagctcaggggatttggatttatattaggaatcctgattcccatctgaaagagtcaaaaccacagacagctaggcctggtatggaggaagtgtgattgggcaagggctggcttattagggaacgtgtgtgttgtgttggagtgctgcagtgctgggttggaagaactggaattactcctaggacatccctttggatgatcagaagtcccattgacatactttctcttttttccctgccttttccttgaactagcatataaatttaacaatccacagagttgcggagttgggcttgtaatattgaaacaagatctgtgctgcaaagcccactgctgactggaaacgcagatgtgcactgctgagctcacagcccctgggaagcatggcccagattcagggtgaaattgcccccaaacatattattgaaatgcattgaacagggactgtttcttttctttttaaaaaaaaaatttaaatgaaaatttcattgcgcaagttagtacacgaacacattctctggaggggaaaaatgcaaaacttctgcagcaatcagaaagttttccttgatgactgttcctaatcccagtcccttccccagaggtccagcactttcatggacttgctgttcttcagatgcctcacatactcacatctatacctataggacttacaaaaagttaagtgcattggctgtggattacgtaaggtctctttactgaattgcctctccctccctcaacagggtgcttggtgatagttcccggctcctatgcaaaggtctccttgattttgtttaacctctgcccggtctccctttgaattagaaggctacacaagtacttcacctttccctaattcatgggcacttcagtcatttccagatcctttactgttaaaaacgctgataccaaaaaacattgctgcacagacctctatagcacctgtgagttttctctggggtaggtactgagaaagtggaactgctgggccgtagggttcttgagttgtacattgtaacaaagatgcattatggggtcagttcctcacttagagttactgtgggacgggggatgcctgccctgtgctcagacattaagcagttatttgaagacaagggggcaggatttagagtgtgctaggtggatgctcaccggcctcacaggtcgcacataccattgctggtttgtgggaagggttggtattgggaagggctcttctgggcctcctagttaattctacctggttcccgccccccaacccctgaggactttgacccgtatgttgatagtggttgtgtggaaaagaatcacaggccgaacgggcagcccgttgtggactctggatgggaaattctaaactcagttcacttggcctggagaccgtcaccgcacctgcggttcttctccaggctgcctttgtaatccagtgtggcttaaacactcaagcaaagcgtgaggcgtttggaagcatgatgttctttaaaggcatctagaatgcggccacgtggctgttattagcagtttatgttaattacagaagaatggcatgtgccactgtttacgattctggccttcatctctatctctctatagaacttgtggaaaacatgagaattaatcctatcagatcaaacccatgcatttaggagccagtgtggcaagggagggagtggctgtgcccttcccgaagacagctttgtggccggttgtgggccggtgtccctggccacctgggtggggagaggcagaggcccctttgcagccttcacgattttacgtgcattcaacctcaaatctccatgcagtctgtaatgaagcagtgctagttggagcctagggcaaccccactcgtgcattcattcactgtccaaatgcagtgtgcacttcatttgccttcactggggtattccagcatcccctctttggtctccagctgatgttagtggggcctcccttttctgtcatttcaatatttggtgaccaagttggcattctactcctctctccaacttggcggattctcttggggccctcctggccttgatcctttgtcctgaagagcgctgccttcttagcttgccctccctgtcacacagcacatttaggttaatggtcctctggcctcataagtcatctttttttatccccgccggccctgagacagggtctcactctgttgttcaggctggaatgcatgggacaattacaactcactgcagcctcaacctcccaggctcaagtgatcctcccacctcagcctcctgagtagctgggactgcaggcacatgctaccacgcctggctgatgtttgtattttttgtagagatggggtctgcctgtgttgcccaggctggtcttgaactcctgagctcaagccatcctctgcctcggcctcccgaagtgctgggatgtgactgtttccatagagctcttgcatggttttcatttttttcttaccatctattacactgcccttgttgatgttaaaatttactgtatttcccccgcatttgcacaaactctttctgataattttccgataggtttggctcttcactgcccgggatttggtgtctactttttttcaggtcagcatttatcgcgcacttttgctaggcacagtgctcagtatccaacatgcattttctcactgtttcctctctcagacctgggggatcagaatctctaggaaggggagcttgggaactcttaacaaaatcaaggcacttctggaaaaaaaaattcattgcctcattaaagccccaaattatcctctgggataggatcaatactttttctcattttgcacgtgaggaaactgaggcacagagtggtgaggtcatttggccaaagtcacaatggggaagtttgagcttttttttaaaactatttttttttttgagatagggtctcactctgtcacccaggctagagtgcagtggcatgattttgactcactgcaacctcctaggtacaagcaattctcatacctcagcctccccagtagctgggattgcaggtgcccaccatcatgtccaggtaacttttgtatttttagtagagatgaggttttgctatgttggtcaggctggtcttgaactcctcaccttaagtgatccacctgccttggcctcccaaagtgctgggattacaggcgtgagtcactgcgcccagccggaagtctgagcttaaggcagccctgactgtttgtgcattctctttgggatatttgtaaagggtgaaataagaagaattgtcgccctgctcctgggggatcccatgcttgattctttgctgtcataatgcacatttcccgttccatgccacaaccactaataccacattagcctcttggtgactcaagtttttaaaaacaaggaagcttatgtggtcatctagtttggtctgtcacttgatgcatacatttcctggctgtacaacatagtagaaagagcatagcttgtctgggtctggtggctcacacctgtaatcctagcactttagaaggccgaggcaggaggatcgattgagcccaggaattcgagaaaagccttggcaacatggtgaaatcctgtctctacaaaaaatacaaaaatgagtcagatgtggtggcacgcacctgtagtcgcagctatttgggaggttgaggtggcaggatagcttgaacctgggaggtcaaggccgcagtgagctgtgatcgtgcgactgcactccagcctgggtggcagagggagaccctgtctcaaaacaaacaaacatagcttttgaaatcagacacatttgggctcacattctgagttctgtcattttctagcttcgtggccttgggaaaattactcaccctgagattcagtttgctcatctgtaaaatgggaatgatgatggtatttataatctcatgggttatttgtgggggattaaatgagacacagtctgcgaaatgctcagcaagttgactggcacttaagtctttgataaatgatagctgttagaacattcctgaatgcacatcagtctttgaaaggccacggattacatataagggttcctgttattctcttgtcacttagatgtgattttatttcttgggaacatcctactgccttttcttcaaaagattctcctcttctgctggccttgaactaagtccagtctacctgctggcctgaggtggcgggggtgtgtgtgtcagccccctcagttgtgttcctggggcaggcagaactcaccagcacccggtgctgattttatcccttccttctctgaaaactcggagagtatgtgccagctgctgtctgcgattgatgcacatttattttgtcacttgggctcagaacgtcctcaccagtgagcagcttctgattaatgccgccaccccatccatttcaagaaaagcttcagagagtggcaccccaacatcctaagctgggactggggtgaactctcattcagcctgtttctccatctctctttcgtctcgaaactcattctcatgcccacagttattggggcataaagattccttaaatggcttcctccagagaaaaatacgtttaaggcacttccttagtggtttgagccctgggcgagcccctcctccactccgtttattttccactatgtatttaaatcttccccgatggtgcctgtcttctcgtcactaaggctgactttctgtttttggggtgaaacctgtgtctccttcaacctccagtcactcagtggattttttttttttagattcataacatattttattttgacttatctaactgatgtcaaaaatggaaaatgttcacatggatattcatctaactcatgggctccattctaaaaaccccctttttaaaaatcaggcttcagtgtcagattgctgaatgtttttttcattttcctgagagatgcaaatgttcattcattcatctcattatacaacacagtacataaatgtagcttcagagcgtattaagtgcttttatacacaagtgctggctgtgtggaccaggtggtagctcatttaggccccaaattcattaagggcagggtctgactcttaggcttcttaatatttggtttggtgcatggtcaagagctggacccacatgttgcatagcagcagggctgatatgtttaaagacgctgggctttttctgctctggggccctttcccgggggttccggtgagtccctccccaggtgggtctgcccccacccgtgtgggcgggattagctcccagaggctggccaggccccacctgggggaggcttgagggcagggccccaaggctgagattcaggcttgggggaacagagcaggaaagagacccggtaccgaaagtgagcggggcaggcacctagtcacatgggtaatgggcaggggtcggtcactggctttggctccagggccagagcagtctgacttagtgttgagctccaagcatggaacactggagttggttcattttgaccagcaagcctctaaatgggtgccttgattacccaccgcaaggagagggcagttgcctttttatgacatgttaattccagccaggtgagtcaccaggtagctctcatcctcctgccaggctcccctgcctgtcggtttggcattgtcagataatgtgatcattcattgaagtgacatttgagttccaaaccagttttctcctttaaccatttcaccctcaggagtgattctcctttgtttggcattgtcagggaatgtgatgatccattcaaatgacttttgagttccaaatagtgtttctactttaacttcctaaatgaaaaaaaaaaaaaaaaaaattggccaggcacagtggctcatgcctgtaatcccagcactttgggaggccgaggtgggcagatcacttgaagccaggagttcgagaccagcctggccaacttggtgaaaccccatctctaccaaaaaggcaaaaattagcccggcatggtggcaggcacctgtaatcccagctacttgggaggctgaggcaggagaattgcttggacctgggaagaggaggctgcagtgagccgagatggcgccactgcaccccaacctggtcgacagagcgagactctatctcaaaaaaaaagagaaagaaaagaaagtagagtccatgttcctgtgttcctctgctttcttcaaggagcgagaatgtaggaaccctttttgtcctcttgggattggcacctggggcgttgttaggcttttaaaactctcacgtctgtgttttatatttttggaatggcagcttttttttttttttttaattggcagcttttgcttgttgttactgcaagtgcttccagtaaatcccttctccatgaaactcactctcttcctctggatccccccaactcaccctccccaggcctgagccgcgccttgctgctgggtctccacttgtggggaagagagaactggaccaggacagcgcgggaaactgacaatgccactgcttgctagctttgggattttggacaaataggtgacctttttgaacctgtgttctcagctctaaaatggggataatgttgttccttcatattttattgagttgctgggaagttgggaaagaagagaagcccccagcgtgtgcattcaagagagtataaacctgagtgccattcaagcatttgtgggtgctttgaggtcctgtgcaggtctcttagaagtttaccctgaagactgctagaattgctagttctgtgaggcttgttctccccagggatactcggctcctggttccctccctccagtcctggctctgggtaaaatgccaagtcagcaatcatccatctccccacctccttctggaactgtcatgtggtttgagaacagtttaaatcaggtttaaccacactgcacgctgcccctgccccaccacatacatgcacgccccagcgccccatgcatttacaaaaacactgcaggacaactgcgtcccctcacccagacatctgtcagcatagtcctgcttatacctgcttccttctgtctacctgtttttaaggaaaccctgtcttggaagcaagttcgaatgctcttgatacttttgccttcattttagggccagcagcaggtattctttcttataacacgtttttcttgaatctgggcctcttcttaccgctggaagatcagctgtttaagatcagtctaaggaggctgcagtcccatcggtgccagtagagagggttgtggattcctgagccctcactatgtgccaaggagtgtcctaagagctgtcttgtgtaatagggtagtgtgaactccagagagtcgtgaacaaaggcactgcgtttctgagagcaaatggggaggtaggtgtgaaggaaggggaagtgtattttttcctgggtagagctgtggaaacgctttcctgccagcagcgcaaacagaaacagtctcttttacttgattgaatgactgttgtgcagtcagaccagcaggaatatttgttgatcaggatcgtttattatttgctggagagaatttgctgtaagcagatcagatgacctatttttatggcccatctgctggaatatgaaaatagtagtgttagttgggagtcccttcttcctcctttccattactgtattacatctattacttagagtaataggaaggctggatgctcagttatagggtatgccatcaagaaaataccagccctgaatgggagttggacaattattctggtccctatcagtcttgatattctatcattttaattttactggtagtctaaactattctacactgatgcagtgtagtccagttttttaaaaccttcagaaaaagacaataattagaatgccctgagaatccacattgtcacactctgaccagctgattgagaacttgaatcaatcaccaatatgctcagtgccatgtgtctgaagcttgtactgtgaaaatcctaagtacacaccacacccctcttaaaaatagggtaacaggacctggtaattccagagagctagaagttttaagtcacggcttttgatgctcttgctaaggccctggctttctattgaaagccaggaggagttttctcctatttcttcaaagaaaaggtccatgtatgcttagcgaagtgtcttttttttttttttttttaaactttctttggggaagacataccaggaaaaaaaaggcttgagaaccagccaccaggtagcagttgggtatgggatgggacagtttgcttctgccaaggttcaaatggtgacctgcaaaccaggaggaccataaacatatttgcatatacttacaaatatgcttgcaagtactcatggcatttgtcagcagagatgttggctaagaattgctgaaaatgaattctttgggaatcttgttctccatggagttccattgtgaaataagagatgcaaacattcactgcaaacattttggcctttgattatttatttatttagagctcagacgatcctcctgcctcagcctcctgagtagtggaactataggcgtgtaccactatgccctgcaagtttagaacatcacactgaaaaacttaagtaaaaatgttatagatttaaaggaaaaattggcacttttctgataaaagataaagaatgatatggttaaatattaaccaaacacctaaaaacttaaactgttgttcctgcagtgatacccggtggagataataaaatatacagagagctgagtttagcagagaactgaagctcttggcaggagggtttatatccctcagttgacctataaattattcattagagaagtagcaagcacccacgcttttgcaaataggagtcttactccaaacttcacccttcttaagttaaaataaaccccacgagttgtgcagtgaatcactttgacttatgacttgtgttctggaagtgctgctaggtgatatcatagctcgctgcagtgtccctgggtggtaggagagcacagccaccgtgcgtgtgtgtgtgcacgcacacaagtgtgggggcgtgcctacgtgtgctgagacatgtggttgtccagcaacagttacatgacaaatagcagtttgcaaccccgaaccacagagagagtttgttttactgttctgcctgttccagttccttaactgatggcagatgtcctcattaagggctattagcacatcagaatgtgtttgctgagcccagaaaagaactaactccttttggacatggactgaaagatgttatctagggtagccaacccctcctgttggtgacggcagtagggagtgaggaacacaagagggcttggtatccccttaaaactttcctgagaagccttcagcacgagtttgtttcagtcagggaattccataagaggagaatgtaaaatcataaagtgggatttggctgtgtgttgaactactgttattgttacccggaaataggtgtttcttgatttctcttggctgctccagaaccatatggcaaactaggggatggctggtttatagggaccattgatagctcccaagaaagaacttaccagaggagtgaatgaagtggagattctggaggagagaggttggaaggaggccaccgctggaatggtggaagtgcaccaggtgggcaggacccccggagtgattatgaggcagcaggaggtcctgaaaagtcacgggcggcccagagttaaccttgctccttgacccacctgttggcagacctttgctgatgctgtcattcgctctgagtccccaaagacccttggttacttgtgctgtctatcgagttgcatctgtaaatgtcatgagtgtgctgattaacacaggcgaggcatcgagtgatgcctggtgatgctgcccagcctggattagtctagatttgtatttctcccacttccatcctattaatccccagtataaacttggctaaagttttccctgactttttgggttgattccattatccctttgcgtgccctgccagagggcaatatgtgtataaaggtcttccccaaacctgaactgctaaatgattaacagtggcttgggctgcttaacagggtcagattaaagcgttgacctttatcctgtaggtaagaggccaagatccaagtggagaagagattttttcaaggaatgaaagtacgtgagaaaatggatgtgtagacttttagatcaggagctattttttctttttatctttttgagatggaatctccgcctgtctcccaggctggagtgcagtggtgtgatcttggctcactgcaacctctgcctcctgggttcaagtgattctttttttttttttttttttttgagacggagtctcactctatcccccaggctggactgcagtggtgcgatctcagctcactgcaacctctgcctcccgggttcaagcgattcttgtgcttcagcctcccaagtagctgcgcttacaagtgcacgccaccacacctggctaatttttgatatttttagtagagatagggtttcaccatgttagccaggctggtcttgaacctcccgacctcaagtgatctgcctgccttggcctcccaaagtgtttgggattacaggcgtgagccactgcacctgtccaggagctatttttcccatcaaggttcactaacatagggaaaaaaacaccaagttgatgaaaatcaacttaattgagtgttttattttgagagatcccacacctactagaatcatggcaggattgtgacctctgacaccagacagacgtgagttcatactcaaggctgcagttcctagttgtgcagctttggcatcctgacctctctgaggttgtcacctcatcagaaatagaagaccattggttcatctcagatccttttgaggattaaattagatacaatttatgaaagctagtacctcttaggcacttaataaagacagtttcccttccttctttctcttctgcttttaaaaattaagatttgggagtactataaataaagccaatgagaaaatgtattttggtgtggaattctggccagttaaaggagaaaggggacaggagggctccagtcagaagtggcaggttcaccagctccatgcgaatccggcaggcctggaaggttgcaggcacaaacaaaataggcagtagaaagcagtctttaaattaaaaaaaagaataaggcttacaaaaaacatcgaccgagtttgttggccaaacatttcaggcgccgtctgaagactgggagcccaggaatttgggaaatactaccctttcttcattttcagtggtagaaaccccaaacttcctgctctagaacgtggggaggccattagttttgttttgttttgttttgttttttggccaagaaaagtggtgcagtttctttctctgggttgatgctgccatctcatgtctctacatggcattgcgacttcacctctggatcctatcagcccagtgaaattgaactgagagttagaggtgctccattttagcctgaggctccaaagacgaaggtatgtaggtgacagtgttttaaaaaacagtttaaggccaggcacggtgcctcatgcctgtaatcccagcatctgcctgcctgctgaggcaggcagatggcctgagctcaggagtttgagaccaccctgggcaacatgatgaaaacctgtctctactaaaatacaaaatattagccaggcgtggtagcgcacacctgtggttccagctacttgggaggctgaggtaggagaattgcttgaacccaggaggcagaggttgcagtgagctgagatcacgccactgcactccagcctgggcaacaaagtgagactccatctt

SEQ ID NO: 3196 - DNA, 4815 bp, Homo sapiens
gtctaacctcagctcatgattcccagaagcttccaaactgattgaaagtggcctgttcaacatttaatgaaattcacatttctgagactcattagtttggatctctggctttgcctgatgggttaaatcagaacattttatgttagttaactattgctggcaaagaggagagaaagaggtaggataatacactaaactaaacagcagaattcaaagtgatttcaggagtaacggatcaatgggaacccagtgaaccaaacctggatttgaatctcctacagacctaaagattccccatgctgcacataaccgaggctgggctggggttaacagtagtctccttggcttgaacctccacatcactaacattctttccacagttgttcatcaccacttctatgtccttctatagatatgttcctaatgttggactttaggaactgcagtggcagacagcaacttttattttccccagccaccatagccccactcaatatgacatttagacagatgagccagcaatacagtagttacatgtgtctgggatttgttttttaaattatatgtaccgcttttaatagcctgattacagctgttcagtaagtgatgcctctagactgaagaggaccgaaatgagaagcaggccagctaagagggctgggagcagcacgttccccttgttattgccagctagtggggagagaacatatggccactttacaaagttaagaatcacaaacagcagacaagaatgaatgattaatgctggagttcctggagtatgggccaaagaagttcccccaaaccttacaaacagaaacacatgcctctgccagtccccacatgggatcccagatgagaaacctctcaaggagaataacaaaatgcagttggaatcaaagtgtatgaagcctcccagacacacccagcaggagtcaccaggaagcagctgggaagaggctgacagcccaccagcaatgagaccacaggagctgctgctcccgggagggagtctgctgtcatcctccacttgctagagttctccctcctctctgcttgttacacactgcttccctgctctagagcttgctccagagatgacttcaacagaacagagtggctcttccttacttgaaacacagatccattgtacctgtggctttggctctggattgtctttctacttagaggagaacaagggtgtgactgagccacatgatggaaagtaaaggtacaaccaaaaattgtggcgtttcctcttgtttatgacattaaatttccctcagcctctaccctcatgctgcctgcttctctaaggctgctcccagggaacaagttaataatctcaaatacagtaatttttgcccctttcagaggtaagagtttaacaggggacaaaggacgaattttccatcatggcatttcaaacatcagtaaaatgttgattatttttcagcactcttgatattatatctgagtagctcttgtagaaattaatgcaagctgtgttttcactgcaatgtgcccttactgtattcacatgcagcgagaggttatgctgatggaacttggccatgatttgtgatattgtttatttacatgtattaatataaaataaaatgcaacgtgctaagtaacatttaagccctcattaacctgttcctgaactatttttccaactccattgatccctactccttgtgattcagccagtacctcaactgtttgtttctatgcttgttcaaggtttgtaatccttagtcctttgctcaaaatgagagtcagcctggcataagggaaaaagcactcaactcagacgagcctgagtgggaaacatgacttaaataagttagcaacttatgcaatatcatttatataactttgagcctttagcataatcatctgtaaaatgaagcttcccactgtgggatgttcttgaaaagggtgttataggatatggaagcactatgcacagatgaggctctcagtaaagttgttccatcatctctgagtacgcaaattttattcatcctttaagttgcagcccagatagcaccttttgcataaagtgtctactgattgcctccactgggatgcaatctttccctcttctcaactcctatctctctttgcctttatcaatcatatagtaagtgcgtctttttattttgtatcacagggtctcaaactgagactctgaatgtggcttgtgcagagtgcttcctgggattctgtgtgtatgggttactctgcatggagcctcctgttgccaaccaaaaaaggactaagcttggctcctttccaattctctgtacataattttgtattcatattatgttctttttcttgaagaaggccctgattttataggtgtcagtccccccaaatcctgattagcacctggggaggagggagatgagggtatggaactactggcatggtgtctgtccatatccgcagagctgaaggagttgtatggatgaaagacataatggtattggaaacaagtgtgctctttggggtctggataacaaagtatggcaaaagttgaggagttgagggaatatctgcaatccaaaagttgaggattagcaatgacagaaccacaatatccacaataccctggacatgcaattggcattctcttcatggatgctaacatcagtagcaacttctcatcaagtcaaatgcctcctcttcagagagtcttgctcactttttgtaacccctttcaccaacctctgtgtcatctaccctatttgtcacttttttttaagaggcaggatcttgctcttgctctatcacccaggctggagtgcagtggtgcaattataactcactgtagcctcaacttctgggcttaagtagtactctcacctccaccttctgagtagctaagactacaggcatgtatcactatgcctgctcccttatttgtcactatctgaaatcatctgatttgcctttccttaacccttcccccaaccacatatacacaaagtgccaagagtcaggggcttttcccaaagtgtttattacttacctctagaagaaaggggtgcctgtcttacaggaagtactcatgaagtatctgaggggtgagtaaatgtgaagactgttcaaggggctttataagaagaagacgaaaataaaggaagccaatatagaagaagaaaggcaggatcaatacctcatagtaacatgagctgacaacctggtttgtgaacatatggaaagcactccttaggatctcccagaaatgtttgatggggatgcttcctgtgtgcagttcctattagagcaggtgggatatttcagtcctcattggctagggagacctgggggcaattaggttatatgcatacttgagtttttttcatggatcttatcttctctattaaactcttaggagaaggtaggacaatcctcaaattgcccaaaggacctaatatatggtcttgcaaaagtgtctgttgataatataagtgtccatcaacagttgactggataaataaattgtgatgtgtatatatatatatatatatgtgtgtgtgtgtgtatatatatatatatgtatacacaccatggaatactatgcatccataaaaagcatgaaatcatgtcctttatagcaacatggatggagctggaggacattatcctaagtgaactaattcagaaacagtaaaccaaataccatatgttctcacttacaagtgggagctaagcaatgggtatacatggacataaaaataagataaatgacactggggactccagaagaagaaagggcaggaagggctaagggttgaaaaattacctattgagtacagtgttcgctaatgagtacactagaaacccaatccccaccagtatgcaatatacccatgtaataaagatgcacgtgtaccctctgaatctaaaacaaaataatttttaaaagtatgttgaaataaagaatgaatgaatcagagtagaagagaatatcttgttccatataaacagtctgtgttagaaaaagcaatataataaaccagaagtgttcagttgtgaaaagggttgaaatttttcaacataaatacgttacataaaagatttctattagaaactccttagaaggcatctattagaaggtagtgtcccttggctgtaaagtctaaaactctcctttgccacaaaatgacattgtacacaaatgtaaataagtataactggttacttagcaaccacaaatatttacaaatatggaagtcaggctccatcaaaatgtcagggtaattattggcaaattgtatatcatgcaaatgttttgcagccatgcaaaatgaacattcttgtagggtgctgccacaattgctcttcactgctgcctagaagtgtcacttagtctcttgggttttgttatgttgaattaatgggacataaaattattttacagaacaagtggatatgtaatttaccatatgcttttccacaggggtcttccacttagttgtcatggggtttaacctagttaaaatgctgcagaattcagcattatttactagatcatcttcctcaaaaaagtcaatatttttttttctaaaaaagacagggagactagaaattttgtggtttaaattttttttcaaaatttattcttttatgaattatatttgtagaaggaatcttttattacttacatttaacagtcttcagaactagtttcaaagattctcttaaggtatgcatgtgcttttttaaaaaaagaaagagagatggagagcaggaaagaacaaggaaggacagggaggggtagagaaagactgaagggaa

SEQ ID NO: 3197 - DNA, 572 bp, Homo sapiens
gaagaaaaatgtacaatcattgtgactgggctcactgtactctggtccttggctctcctaagactcataaaagccgctccagcggctaaggaagttctgtgcaaagcctgtagtttctagttgtgaagatcttcaggtttgcttgagcaatgaaagagtactggatttggagtccgcagtcctggatggccaccattaccagcaaaaggagtatttccggagcctggcacaacgctgggcacattgatggggctcaatgaatatgtattaaatgaacgagtgacagaacagattcgagacttggtgctgccatctactacagagaccttgatcgtgtcctttatctgccgtgaacctcagtttccatatctgtcaaccaggggtggttccctggggtagtgtgagagtaaattcccgccgcctgaggtgtgcagagttcccgcccttcccggagccgggcgccccaggagcgctctctctggctcccgccagaaaggatggctcctaggggtcagggccaggggtctgggaaggggtcgcgccgccagcagccagctccgggggaggcggcc

SEQ ID NO: 3198 - DNA, 1176 bp, Homo sapiens
tggggtctcctgagggtgcccccgccctcaggtaaggctacatgtgtgagaagcacgcagagcctgccattgtgtgtgtgtgtgtagcttggctgtggggctgagtgtgtgtgtagaagggaagtaaagcgtgagtatgggtgtgacaaaaattgtacttgtgtgcctgtgtccttggggtcacacaaggctgggaagacaggctaatgtccatgaaatgagtgtggccacatcacttggtgtgggcaccgatcactccccaaactcatttaaagccatagctgtcctggcaggtgtgagccatgctgggtctaggggtagggtgggagacaaagagagccacaagtcttgtcacttgcagatggcggaggggcgcccctccggcccttcctgacctaccctctctcccgctatggcggttgtcccaagcactcagtgatgggcacggggctgggcaccgccactctagggacatcagccaggggctggggtgtgagttgcaggaggggatgcagggctggagggggattagcaattccgagcactggctgcataattaaaaaatcattacggcaggcgggcagagctgagtgtgagctcacgcttagagcgggcggggacactgccatggcgctccccctcccactgcttccccgaggaaaaatcccacctgctaatataattatggaaaaacacaagcacagaaatttggtttcagcaaacaacgtgcctcagtgcccagggcctgcctggccctcagcacagcgagcaggctggccactggcatccagggctcatggcagtaaggcaggccctgctaggtccagacattacctccaccccctcagcaaccccccaagagaggagactgggaggggtatacaaagcccagctccctaaatcccaaattcaggagaaaatgggctggtgctgatggtttacaaacggggaaaccgaggctaaggactctacataaggtcactgtgtttgtggcaaagccaagaggaactggatccgtgctcagtgcaacacctcagggctcaacatcccctcccgactccccctatcagtcatcccccagccttctccgctccgcctgggataagcatatctctcccgagactgaagagagcctccaagccagcacaccagagctctgcatccaggcctggagcc

SEQ ID NO: 3199 - DNA, 4377 bp, Homo sapiens
ctcactgtaatgtccacctcctgggttcaagatattcttgtgccttagcctcctgagtagctgggattacaggcatgcaccaccatgcccagctaatttttgtatttttagtagagatggggttttgccttgttggccaggctggtcttgaactcctggcttcaagtgatctgcctgccttggcttcccaaagtgctgaggttgcaagtgtgagccaccatgcccagctgtgtatgctgacttcataagacgacaagagagtgcataaaacacaagggagacaaagaaataaagtcttggctgtggtatgctcagatctgtagacaacatacctcccccaacaaaagaagaagactagttccatgataatccagaaacctttcagaagagttaagagaaggatgcgtgcacagaagtcacgacaagggaaaaaacgaagacactaagtacattcagtttttgtctgctttgttttgctctacagttggtattttcttgaaaaagaatgcaagccaaagtatccaattcttaaacctattatataacacgatgtgaaaaatagtgatgcagaattctgtacttgtggaaattagtttgtctggaaacatctgaggtccttgtatgtaaatgaacattcagaaaaatctctgtattagatctgaactcttacgagaggttttagtttcccagaaaagtggcctcctagaaccacagggaagtttcagacctgttgattcaatggtctctttactgtgccccaaagaatccataaaagagtcttattcattcaacaagcatataatgagtacctgctatgtggcagacactgttctagtactcagtgataaaaacaaacaattcttaccttgccctagaatggaaaaggtaggttgctggtgatctaattgttaagtgcctgctgtaagatttgcttcatgagttaatggtctgttgtgagacttctttaaaagaaaaggttttaataaaaatgaactaacgctatttaaaaatagctagtctactctaaaccttcattttatattaaaattttatggcccaaaaagggaaaccaaatctcctgaggtagtgtggagctggtggcagggccaggactagcacaccacattctaggctccaagtgaaggcttttccctctctctcccacactgttttttggctcttctcccaccccaccccacttgacagactagtctagtaggagctcacagatatggaataaaaaggttagagtctaaatcccagataaatcaattacattttcctggaactcagttttcctggatcttaaaggatacatgtggtttggggaatcaaatcagcccaaatattttgtacataatctgtaaactgtaaaatactatacagatgttagtaattatagtctgagttcctgtgtcttctcattggtactcctcaaagcaaaataattgaaagatggagtaataatagtgaaatgaaaggaaaataaaatgtgtccactggccaaattgttatagttaaaacaaaaaaaaatgaaatctaaacaatcttagttagatgctggccctgctgcttcctatgcaatgtcagtcagtgcagggaggccctgtgggcaatggtgaggcttgagcactagaaagtcagacaggctctgaagtaatctccctgtctccaatttgtcaactgtaaagtggagaagatgacactagtgcctatttcatttggctgctctttgagatggtgctttaaaagcctttagcataatatttaggacacactcaatgctcagtgatgattatctattatttttaattctaaaatatggacaataactcctacctcataggatatttatgaggattgaatgaacgaaagtaaactgtacatccaataagtgagtgatgtctctgaaaggttaaaaatatgttctttaccttttccttcattttttactgatttatgaaattggttgcaaaaaaatatacttactggaggattgtaatttaaggggcatgtgataagccaatttctctgtcagtagctccaaaattttagtatatgtcagaattttatgccaaaccaggaaggcaatcccattcacaattgccacaaaaaataataaaataaggaattcagccaactagggaggtaaaagatctctacaatgagaactacaaaacactgctcaaagaaatcacggttgatacagacaaatggaaaaacatgccatgctcataaataagaagagtaaatatcattaaaaatggccatactgcccaaagcaatttatagattcaatgcaatttgtatcaaacttccaacaacatgtgtcacagaactagaaaaagctactttgaaatacatatggaaccaaaaaagatcccaaataaccaagggaattcaagtaaacagaacaaagctggaagcctcatgccacccaatttcaaactatactgcagggccgtggtaatcaaaacagcatggtactggtatgaaaaaagatattcatttttttaaaaaggcagcagtatccatggaccctcctcctatggagagggagctcagaaatctgatttttaacaaataatttcaacactataacacaaacgatggtgatatggtttggatgtgtccccacccaaatctcatcttgaattgtagctcccacaatttccacttgtcacgggagggaactggtgggaggtagtgaaattgttgagtgcatgtctttcctgtgctgttctcatgatagcgaataagtatcaagagatctaatgtttttttaaaggggagtttccctgcacaagctctcttctcttgtctgccaccatgtgagacatgcctttcaccttccaccgtgattgtgaggcctccccagctatgtggaactgtgagtccattaaacctctttcttttgtaaactgcccagtctcaagtaggtctttatcagcagcaagaaaacagactaacatggatgggtaaacacttcttgagtggtgtaagcccttgttactcaaactgtgtgttctggcagcaaaagcaactccctggggatttgctagaatcacagaatctcagctgcaccctgacctgctaaatcagagacagcattttaacaagatccctgggtgacgtgtgtgtgtgtgtgtgtgtgtgtgtgtgtgtgtgtgtgtgtgtgtgtgtgtctaagctctgtctcttgggagttaggtaactgactgtcttcctggatctcatagcttctttttctgttaaaaaaaaaaaagtcattgctcttccttataaatgggagctttataaaagcttaatagaaaaaaagaacatattaagatatctcaatatttctgctgaattattatcagaagtttttcccattatattggtcagtgtctttcatttaaaaggctgtatgataaatggattttagaaagacaaaatctcttttaaaatatttatcttctgaccatttttattttatttttaaaaagggaatgaaaatcatttggaagtttttcattggctactacctcaaagttaaatttgatattcagttacagtaactttaatagcccaggtttggatatgttaatccccctccctatttgtagagctttttgctgttctactgcttcttaaagattttttaaacatagatacaattaatatactataggccaggtgctatggctcatgcttgtaatcccagcattttgggaggctgaggtaggtggatcacttgaggtcaggagtttgagaccagcctggccaacacggtgaaaccccatctctactaaaaatataaaaattagctgcgtgtggtggtgcatgcctgtaatcccagctacgtggtggcttgaggtgggacaatcatttgaacccaggaggcagaagttgcagtgagctgagattgcaccactgtactccagcctgggtgacagagtgagactccatctcaaataataataataataataataataataataataataataataaatatactctaaagctcaaagccagattattttcacatatccatgcacccatgtaaaaatagttacattgcaccccttcccagtcaatagctcccaattccaccccaactattccaacttctatcactatagattagttttggccattcttgaacttcatataaatgaaatcatagagtatataatcctctgtgtctgctttctcttacttaagatcttcaaaatacatccatgttattgtatgtgctagcagttcatcctttttattgctgtgtagtattccattgtatgaatacattgcaactttttatccatgcttctgttgtgggcatatgagtaatttccagttgggagtattacaaataaaactgatgtgaag

SEQ ID NO: 3200 - DNA, 5760 bp, Homo sapiens
caccgatcatggagatggatgagggaagtggggtgtgtaggaagggatgatgcccattgatgatctaaagaatattgtgtacctgcttacagatttgtcgtgtttgaatataatttttaaatgttttcactaaaaagaacctggcccctttaataaaggagcagtatgtgccagccatcctgagactggtggggaaaactgctagaagcctatgacatagctcagcaataaacaaactcccatgtggatataaataacttatcacaaacaccagaaccagtggagaaaaggctgccaaacctcaggctcaaatggcacttgggacaggtcatgttagaaaagagccataaccagaaatacaccagaactccagaatagagaaggtcacaggacaagtctcaacaaaattacccttgtttggagaacttcaaaaaattatcagatgagaactcacagaaggtaagtaaagggaaaaaccaatagctccattacctcaaaagagaactccactggacaatttgagaaaattgaagactgtgccagctaattcatttctctaaattcagcagtaataggcagctgaaaaagaattataatctaggactacctgtttcaaatagccatatgttttttaatatctctgagattctccttagccattttgtgatacgagttttattttaaggtggctcaaattctcttaataagtagaaaataatgacaaatgagcacactccaaattcagtcttttatcattttaattaaatatgtcagtggcctttcctgttagcagaaaaatatgaaatgtatgtggggaataaatcaagaaaactttcatggatattgtggagcaacttagttctttatgtttgcttcaaatccatgtggaaatagataaggcacaaatactgaataagttaatttatctgaagcttataacaatgtcaaatatattacttttataagggatctttctgaaacaacacattaaaataccatctgaaattggtttctctagaccctgactagccatcttcttacatattttactccaaaacctttttctgtacaacatgcgattgtttctctctcttttaaaatatattaggatctgagaaaagaaatatattttgactcagatatactacagattgaaggcctccaatctggtcaacataatccaccatattaaatgttcaagtttaattggcttgtctcattaaggataattagttaaggctataaatgacttacctcactaaggatgaacagttaaggctataattaaatccccattcctgtggccaggtcttaggaaaacataaccaaaagacagctaagcccctcaattccagtgtaaagggcctgatgcagaggaagagggaaaagcttgtcttcagtgctggtttgctgagtatgtgtgtattcacacaggggaaactataagagatatgaggccccttcataggatcaggctggctccacatctgttctagtcttaagataccttgagtcccaactctacttcctgcttttccagtgtgtggaactttgccagcaaacatgttccaggaggagccattaacaactcatattcataatccacatgtcttccatgggaaagaatattctgcatggcagtgaccttcctaacttagcattaaacaggaattattctaggtatatgttaatatttcatttaatccaagggcagggatgcaaacaggcttcaagagctactcaatgaacaaagcactagaaagccatttggaaccaaggaatctatcctttcatagttttcaagggcatgaggtttcaaacttctctccctcccttccttcctcattcctccctccttccctccctctcttccttccttccttctctctctctctctctcctcacctccctcctttcatctctctctgtgtggaccgaagttctaagttcttttgttatttccatgcacatctgaagcatcttatatgtatgaggtacctgtggctcttaaatgtccaagatacctagtgtgtttcactttcaatttcaaattcactagatatagaattaaatatagaacaagtggaattgcgtgcttatccctaatccaatcatttatggccggggagatttggttccatactagataatggcagctgagatccatttctgtaggttaggagtagattataaataaaggatgttgtatgtgggtccaacgacccaaaaagtatctcttttattgagtcatagaaagttgaatcacgcgaagtttagctagccattcctatctacattaaagaaatttagaattataccctaattcagtatctttctacaggtggtcaaagactggtataaatatctatctagttcatatatctttatttatatttatctattgattgatctatcaatctgtctatatgtgatctatactacacatatctatatctttctattgattaatctgttctatactagatatatatgtctatctttatctattgtaggatatagatgtatatagatatgtttagtagatatatatataaatatatttagtatatctatttctacacctctttatatacattgatagagatagagatagatatatctgttatagatcacattgcaattgccaaaagttcagctctttttccagataggccagtgccaggatatgttcagaggactcttcttggtaatcctgtagtaggcaactgctaccactctggtggaatgatgaatcaatcatatctgcaaggactgacaacagcaggaccgggcaatctccaggaacctgatacagcctggaggcgggcaactatggtgccccttctggccatatacctgcctgacttgattattaccataggaatacatagtttgaagaaggcttgaaaacaattacaatggaccaggtgctacccagcagaaagagaaatttaagggaccccttttacggcagagtgcatctaatgcaagaaagtaattgtagaagaaactaactcttccatcaagctttgtatcatattatacatcagataagctcatcaactgtgaaaattttaagctttatgcctccctacttgaaggctcttttgaacaacatctgctggagttcttcaaccagtaaataaagttattatgcagtccatattttaccttttgttcataaaaatgattcttaaattttttttcataaaattctttcttcaagttgagataggctacatgtccaaattaaagacaaataaaaatatatcagcaattatattacatgtgagtgaaataaaactgcaagacaaagtttgtcaagctgggttaaagaaagcaaaacaaaatacttcttatacacctaaagttgaaagtaaaaggatggaaaatatataaaacattaacaaaaggacaattgctaatactgtattaatgtaagactcagtacaatatatttaaagtactaatagacacaaaatgattaacttaaaatggtcagttcaacagaatattaaaatcttaagtttgtatgcataaagtagaatgattcaaaaggaagaaataaaactttttattgcagatgctgtaattgtgcacttggaaaattgaaaacaatcaacatataagtttttaaaacaaatacagtaaatacattttgtgagatcactggatgtattgtcaatatacaggaatcaattatggtgtgtgtgtgtgtgtgtgtgtgtgtgtgtgcaacaaacaaataccaatttaagaaaaatactgtttttaagaccatcaaaaagcaccaaacgctaggagaaaaactaatgaaagttgtgtatgagctctacactaacaactattagctattaccaagaaaaattaagaaagacctacatagatggatatgtttaacatatttatggattagaagaaacaatatttaaatctgtcagttctctccagattaatctgtagcttcaaaataattccaatggggtgtgtgtgtttgtgtgtgtgtgtgtgtgaaaatcaacaaaacaagtataaaatgtatataaaaatgaaaaaacccagattaataaagatgatcttgaagatcaaagctggaggtgttacactactggatttttaagtcttataaaactacattaattaaaactgtgatttttgaagcaagtttagataaattaaccaaggaatagaagagaattcaaattgtatccatacttataaggccatctgaattatgataaagatgtcattgtaatgcaatggggaaaattggttgtttcaataaacagtgctgcatcagttgaatactaggccttactactatttcactctgttcacaaaaataaatttcaggtggattacaaatctaaatatgaaatataagacaataagtcttctaaaataaaatctaggaggatgacttcaagaactcaggtttgcaaagatatcttaaacaaaacacagagagccctaaccacaagagaaaagactagtaagttgagttttgttcaaattaaggaattctgttcatttacacacactatttaggaagtgaaaacataagctacagagtgggaagacataaataatttctacaaagcaataagtaaaattaacccaattttttaaatgagcaaaatactttacaaagtagtgtgatcaaatgactaataagcatatgaaaaagtggtcaaaaacattacatatgagatgaaaatgcattaaaacctctgtgagataatactagaaacccatcacaattaaaaccaatcaaaagtaaaaggtttgacaaccccgggtttgggtgagggagtaattggctttctaatactgctggagggaatgtaaattaatacttactgctttggaaaattagcattaacaaactgctgtgacacacaacaacatggatgaatctcacagatactatgttgagcgaaaaatgtcagacaccaaaaatcacagatagtatcattccatgcgtgtgcagttaaaaagcaagcaaaactaacctccagtaatagtagctgggatagcatttactttttaagggttactgactgggagacagcaaaaggaagctttctgcataatgctctccattcacggtctgattggtggaaatactcatttttaaaattcttctagctttactcttaagattgatatacttcattgtatatatggtatagcccaattaaaatgtctgtaaaagttatctgttgaaaaaatggtttgctagaagacaaaataataaaataacaaaaataaataaaccatttgtaaaagttatcaaaggaaaacagaatgttaatttactctgggtcatttctaataatataaattgtctttttaaggtttataacatgatgttttaatacacacatacatagggaaatcattactattgtcaagcttaataacattatacatttcctcacatagttactatgtgtgtgtctatatgttccatgagagcacctgaaatctagtcccccaacaaatttccggtatataatacagtattattaactataatcattatgctgcacattagttctctagacctacataccctacataattgcaactgtaccctatgaccaatatatctcctccacttcctcgcttctggtaccatttttctactctctgttgttgcaaatggcagaatctctttttctttaaaaggctgaataatatttctctctctctctctctctttctctctctctctctgtgtgtgtgtgtgtgtgtgtg

SEQ ID NO: 3201 - DNA, 2389 bp, Homo sapiens
gacagggtctcactctgtcacccagactggagtacactggtgtgatctcggctcactgcaacctccgcctcccaggctcaagtgattctcctgcctcagcctctcgagtagctggaattacaagcatgtgccactaccaccctgctaatttttgtatttttagtagagatgcggtttcaccatgttggccaggctggccttgaactcatgaccttaaatgatccacccgcctcagcctcccaagtgctgggattttaggtgtgagccactcgcctggcagaaagactgtcttctgaaaaggacttttgggagtgaaataacatcagctctaagtgactcatgtgcctatatccacctggttggtggtgaagaggagttgaaaggaatgaaggattctaggacagaaggttcctattgagaagacactttcggctataaccactgttacgtgtgtgtaatttattcaacactactgtgtatataacggacaaacaaatcatatttaaaacatcatctagtctttttagatgtttagaagtgcacaaagtatgttaaaagtagaggtaaataacacattttgtagatatccttttgatgtgaaatattgtcttttggaaattgagcaaaccaattccctgagccgtacacattattatatctgtgtcagtttggggaggaaggaggagcagaaagtacaaagggcttttcaccagtgtgtttatggtgaggcacattgactattatctttttttttttttttttgagacgacgtctcgctctgtcaccaagctggggtgcagtggcgcaatcttggctctctgcaacctctgcctcctgtattcaagcgattctcctgcctcagcctccagagtacctgggactacaggtgtgcaccaccacacccagctaatttttgtatttttagtagagaaggagtttcaccatgtttgccaggatggtcttgatctaagtctgcattttctttgtgctgtgtagatagcgtacataagaggacaaaccaatcctaatctatatcatctagtctttgtagatgttagagaggtccagtgcgtgacaaaagtagatttagtgaattaaaacactgagtacgttttgtgttaaaattcatagggaagactgttgttaaaaacatagaagtgggcagggcacggtggctcacgcctgtaatcccagcactttgggaggctgaggtgggcagatcacttgtggtcaggagttcaagaccagcctgaccaatatgatgaaatcctgtgtctactaaaaatacaaaaattagctgggcatggcagcgggcacctgtaatcccaggtacttgggaggctgaggcaggagaattgcttgaaccctggaggcagaggttgttagaatcctttctacacaatacatttggcttatagctgtccacagggtggacagaggttggaacgggaagggttctaggccaaaatgttcaggggaggggtgctaggccagaatgttcgtatttagaagacactttcaaattacagtctatgttatgtatatgcaccatttattcaatgctactatgtatatagtggaaaacctaagtcctctttgaaacatctagtctttctaaatgtttaaaagtgcacaacataggttagaagtagagggctaaagtgacaccctttaagcattttctttattactttttaggagtgtttgcatttggaaatggaatggttaaacttgatgctttggactgttcatagggtgatggtgggtgtaggaggaggaagtatgcaaagggaagggttctgtgcccaagagttagattagttcacatgatctaaccattgttctatatgcattttagttaatagtgttttgttttttatttttgatggagttttgctcttgttgcccaggttggagtgcaatggtgtgatctaggctcactgcaacctctgcctcctgggttcaagtggttctcctgcctcagcctcctgagtagctaggattataggcacacaccaccacacctggctaatttttttggtaatttttagtagattcggtgtttcaccatgttggccgggcttgtcttgaactcctgacctcaggtgatccacccacctcagcctcccaaagtgctgggattacaggtgtgagccaccgcacctggccaatagtgggtattaaaagataaacaagtcttaatgctcaaagtatgttaaaaatagatgtagtaaaacaatccgtctacaaatgttcttttgttatattttaggaggcctgtcttctgggagtgacctttgttattccacctcttggagctaggcatagtcctatacctagtcactgggatggtggaagagggagaaaaggaaggatgaaggaaagagct

SEQ ID NO: 3202 - DNA, 1305 bp, Homo sapiens
agcgtcacgccttcttcctccagatccctcgcacatgctgttccctcatcttgaagtgtccttctgccatttataaggacctgatgattgatttagcatctttggcatccggccactgctctgcttggccatactgctgccttcaccctcagctgttgcaactcttttggccactttgtgtaactgccctgccaagccctgcttcctggctgtccaaagaaagaagtgtttcctacaggagatcacaacaaaaggatgaaatctggggtgcaggggaagggtagcttctgaagctggaaaataaagaagtaaggaagggagactgtggaatttaccagggagggaaactaatatttcctttcatataagttggtactattctggctttttaccatgatcatatattatattcaaaataaagctcttgtttttgaaacaaaaaaatataaacaaaggaaggaaggatgttcatttatttagataatagatacctagtgaacccctagtagaccttgtactgggtcctggggacactggtgaccaggttccattcctgatctcctggagcaggggacacgaaaagacattaagcaaataattacacatctttttacatcagtacaaatgttgggactttgcaagagttccaccctgaaagcttctgttttcactgaaagagaggaggcaaggtcatttgttcataaaagcaatggaattgagtaggggacttgaaagaaatgatgaggctaggaaaagcagctataggaaagggggcaccagtcagactaagaatatgtaaccagagcacagctgtgcatactttgcttgaatgtctccaagttcaaatccaagaacttgatattttaggttgattctatgtgtaacctatttgtttttaaagagtagagtctttttcttccagcatgtgttagttagccctgtctttatcacatcaccaccaccaattgtcatttgcagaagtatcttcaactcatcataaatttactagtaatagctaactcatgtctatagaactgttaagtgacaagataatatttagattaaaagctatagttgcattcttattagagacttaatcagattttaacatgctcctcacaggggccatttagccctattctgctgggctttggcaagcactgaatgattgccctcctagggcagaggtactgcagccctggttaagcattgaaaagatgatattaccaataagttgactctaattgtaaacaacatatttaaacaattacatcttaattaaattcttataaattataagtgcct

SEQ ID NO: 3203 - DNA, 4032 bp, Homo sapiens
gttttgattcagtgtcaccgcaatggagtgagtctttggttgtttgtgatgttgccgaagatttagtggaaaagctgagaaagtttcgttttcgcaaagaaacgaacaacgctgctattataatgaagattgacaaggataaacgcctggtggtactggatgaggagcttgagggcatttcaccagatgaacttaaagatgaactacctgaacgacaacctcgatcttcattgtgtatagttataaatatcaacatgatgatggaagagtttcatatcctctgtgctttattttctccagtcctgttggatgtaagcctgaacaacagatgatgtatgctggaagtaagaataagctagtccagacagctgaactaaccaaggtatttgaaataagaaataccgaagacctaactgaagaatggttacgtgagaaacttggattttttcactaatgtgaacttctgtgtttctaaagtatttatgtattaacctgaccatactggaatcagacataaatacttatttatgcctaaaaatgcactgttacttacagtttgtttcctgcagtaaagaaaaattcttcatttgtgcaaaatttgaacaaagaggaaatcatcttcatagtaatgaaactttgtaaagtgtttccttatattggtaattgttaggtggactacttttctccagggactttttgcactcttgtgactaatttctataacttatggttcggaatttgttactatttacagacaccattggaaagtggatatattagattgtgagagacaacagttgcctccttttgacaaatactggatattagcagtttatttatgaaaatagcgtattatcacttgtcaaatcattgaaattcatttggggtcaaagacttgagtgacccagtattgagccatgaataatttagtgtaacctgtattacaagtacattgatgaattctgtatcttctttggtttcctgtatctttttaatcaagtctagaaactatgttcatcagtcactcatttttaaggtcgggagttagattttatgatagaattatgactgttagcttttctccttatagcatcttagtcttagaaattggtgggttgtaataatcaagggcttcattccttttatgtcatttctagacagttttgaatctaggttaataacactttatttataaagcacctcaatgtcctgtgaacactaattattttaaatgtgttaatactgtgcctttgatttgttagctttaaagttagtttaagacttttacactgccagtattccacatttggtgaaattaatacttttttaaagggtccaaataaaataattttctaatgtgtatatctgaaatttgtaataaaatcaacttcatattttaaaaattccaactatctgcttgcattggtgaatatatggcagtcgagagttataattttgggtatacttgtggttagttttgtgccataggaaaaaattatcttaaaactttggccatagttaataacattaacacttcaatagcaatcacatcttatatcctaaatgtcagaagatattctgaactggatgcctgaatagttaactaaaccagtcttgttagatgatggtactcttggcataaagcgaggattctgatatttggcatacttgtaaaaacaaatacataagtaaccattgaacattaatttgataataggtctagagactctaaaaactaaccaaacttggtgagtgtattcttatattaagaatatcttagtcatctcaaaactagcaaaatttaaattttggcatgttttccattcatatgttctttgcattttatttttgaggtttctgtgagaagtaaagatagttggaatttttgcgatattgaatagaacatcttctgttcccaacactgtttggcttcactaatttagaagtcaggaagcaatagaaagttggagatgaggaagtgctagagtaggtgtttgttttggttcttggagggaaaagattctttattccaatttccagagagaagagaaaactcacccaggaagtttaaaaattctttaaacaggtattttgatattggagaataacatgcatataattctgtaggaatgcacatgtaatccaagtgagtggagagtgtttttaatgtttttgaatgaaggaaatgaggttttgtttcacctgttttgcagcagtaagagaaactagtgctgcaagaatgtattttttaatgaagttccttattttgtcttgcatgttttagttttgcttatttttaaatttggaggtcctccataatgtcagataatattgacctgccatacgttagcactcttagttccgctactgtctttaacaggagcaaagagctgtgataaaccatgcttttttgagcttgtctgactcctaattaataacatgtttttggcaagacaacagattgaggttagaggatcagtaggacatttttattccatctgtcctatggggaaatttacaaatcccgtgctctaaaatgttctcaaacatttatatagatttccctttcatcttactaaattttgcattgttcttttcaagtatgtttcgtatttactgtctttttttctgccatttcccaaataataactccagatttcataattccagtttttacattccgttatctttctggtacaaccattcccattcagccttaaatctgagtcctttttagcagcaacttttttcctgggatcctccttcgtggtcttctaagtcagtgttagttttgaaatttttggccctgcataagttctgcatagcatctaatgtcaaaatagaaccaactggtaatcacagtattatttagtgtggtttccatgacaacaaaaatacatacgaagaaaacttctcaggttactatgctgaaattccaaaatgtctgagttttgaatagtgatcactttgttctggtattgacgcaattatattaggaaaaaagttggttgactgtttttgtttaattgacttctaaaatgttcaaattgtctagttctaaaagtttactaaatgcctagtgcagttaaacatactcttgtttaagtgtgtgttgctaaattttttactgtcattactaaataatctgtgtggcaaaatgtgtgtcagcacttttccctccttttttatctcctattttcaggagtcaaatgtagccataaactgtatccttgtctgacactttagctaaaaatttccagttaggggagtttattgccaaattaaatttggctgttccccccaacccatatagatattaaggaaggtgtacttaaaaaatgtttggactgcttttaaaacctgagcaatgtcattaatccatatgtggactagtgatgaatagatattttcataagagtttaaatgctgatatttggtggaagtagagagtaactcatattctatcaattcaagtattcttactatggttgctttccctatttgttcaatagactgataatactggaatttatagagtttgagccattacaacttttgtgaggatgtgtttcaaacatttctggacaaatcttattttgtatttctggaagaatgtagtaatcttctagaccgcttaaaaccaatgctcccaagctgaatattcttgagaaatttgtttttattatgccatttgacatttcaaatcagtgctcatatacagtaaacttgtgatagaaattgtattttattgctttttggattataattcatataaatataattacttgaatattgtttgagatcattaacatgccagggcagttcccactgatttagatggtccaagataatctcattcaggaggcttgaaacattaatggtttagtcttgtgaattttaacagttctctgtcatcgtttaacaaaaccaacaactgacacaactccttaagctgtggtttcagtctctgctagttcatattgcatgtttattttggacagtcttttgttaagcatggtgcttgtactggtt

SEQ ID NO: 3204 - DNA, 18492 bp, Homo sapiens
aaagaatatatatttatatatataaatatatatataagataaaatatatatatatttttccattttgaacgtattgggttttttccatgctgtttcctactctcctcttttgcacccctcccatttccttcgtttttcttcgaaaatttcttccccctccagttcgctgtccggccctcacatgtgcgagaggggcagtgtgtcgttaatggccgtggcgggcaccgggctgctcctgtagtgctgggacatgtgaagttggctggggcggcgtgttccggcacctcggcgcgggtaaggtacgtgctgatcaggtcccggaggtccccggcctggcagggcgccctggagtgggaggaagaggtaaccacagcggggctggagtagggtgccctactgcgagtaggacgtgctgtaggtgggcgagcagttctcgcaggtctgcgaactggtcatggagttgtactgcagggcgcccacgtcatagcggtgtatgggctgcatctgcgcggcaccgttggcgtggaggcccgggtgctgtgcgtagcccagctggtcctgcatcatgctgtagctgccattgctccagccgttcaggtgcttgtaactgtccatgcgctggttcacgcccacgcccagaccggcgcccaccccgaccctgttgagccaacttttaagttgccacatgacacatcttgtccatcagacctatatcacatgatcacactgagctgaaagagaaactttaaatgtcttcattctgtatgtccagttgtataccaaaaactggaagaagggaaggacatcttgggggacaactggctctcttatgacaatccaccgctttgaataccaagttttcatgcctcatttttttttccccagtgtggaagatacccatccacaagagagtgggctcaaagtgactgcatttacttctaaatgtgccatactctctataaggtcttaaattagctccttgttatacttcataaatgaaaagagtatcttcccctacgtacccagagtgtagtaacaatttcaattcagaaagggaaagaggccgggcgtggtggctcacgcctgtaatcccagcactttgggaggccgaggcgggcggatcacgaggtcaggagatcgagaccatcctggctaacacggtgaaaccccgtctctactaaaaatacaaaaaattagccgggcgaggtggcgggcgcctgtagtcccagctactcgggaggctgaggcaggagaatggcgtgaaccccagggggcggagcctgcagtgagccgggattgcgccactgcactccagcctgggcgacagcgagactccgtctcaacaaaaaaaaaaaaaaaagaaagggaaagaatgggcaacacaactctcactagttcctaccagttatcaaatccaccgccactatcccccagcagaaaagcgggataaaatacgggactcatctatttgaaggcagtagaaatctgtccaagcaggactctaaaaaggagtgaacatttctgaggtgagctgacctgtggctgcttttagtttgggggcacttgtccattctggttgcagaccggaggctggtaattttgattttgtatttttttaaagcttgcctccagaggacagcaaccaagaaagcttttggtagagatatggaacagccttaaacatgggcaatttccactcagaaaatttgcaaagttgtggtgctgtttaggagagaaaacaaaagtaggcagaaagcttcataaaacaaagattaaaaatcaggacttgccagaaggaggggatctggagaatatcctaggtgaccattagaaaactctgaggctaggggcacgtcaaatgtagaatgagccttatgccaagatttgtaactctgccttgatttatcatgattcttggttggattaagttctagcagaagacaggttgcctcactgaagaaagacatcacccaaagccagtaacattaaaacatctggaaaccaatggaaaattacaagaaatgccaaaaccacatggaccacgtgaccaaaaactaagagaaaaaaaagtgacatgagaaaccaagccacagacaattcacatattggagttcactggcaagaactctaagataactatgactaatgtgtttgagacaattatggataagataataggcaaagactttgatcagaaaagtaatctataaaaatcaaatggatattctagaactgaatacagtgtctggagttgagaacacagtaggtggatgtaatagtggatttgtgtaacaaaagacaagattagtgaactacaagacaggtcagtagaaaaaaatacatactgaagcatgtattggaggcatgtaaacacaatgaaaagcctttagaaagataattggagtcttggaatagaatggggccaaagtaacatttgaccaagctcagaaaactaaagcaggacaaagaaaaatagaatcacacttaggcacatcaaagtaaaccaactaaaaagtaaagacagaaaacatcttaaagacagccatctcccacagaaacaatggaaaccaaaaagactagaataatacttttaaagtgcttacagaaagtagctgctgatctagaaattcataccctgcaaaaaatatccttcaaaaatgaaggtgaaatggggctgggtgcagtggctcacgcctgtaatcccagcaccatgcccggctaattcttttgatttttagtagaaatgaggtctcactgtgttgcccaggttggtcttgaattcctgagcaaaaaagattctcctgcctcagcgtcccaaattgctgagatgacagctgtgagccactgtgcccattttgtttttggtttgtttgttttttaatttggctcttttagttgattttcatgggagcattgatctagagcaagttagtacatcagtagtttccaacctcgagatgattgtgtcccctccccaggggacctttggcaatatctggagacatttttgactgtcatagattggggtcagtgaggatactactggcatctagtgagtcaagactagggatgctggttaacatctgtaacaggatagccctctgtaacaaagaattatctttccccaaatgtcattagtatcaagattgagacatcctgcattataaagttttgattttagtatttttttaaaaagctctctgatttcagatatttttctgattttacatttaaaagaccttaaatggcacacaaacggtataaattcaagttgatgaacattgagttcaatgtgagttaactgaagagaatagccattggattcttatgtcacccctatttatctctctagagatatatggaggataacttggtggacaaaatacagttagaagctgagaatattggtctcaatttcagctgagaatttgagatgaaacatgtatgcttggaagtcatttatacacagctgttagttgaagctattgtaatgtataagtcttctcatttgtaaagcacaagagagcagggccaaggacagaactcttaagggcaggggaaggagggaagaccattggtgtttaaggactccattcctccatatgatcaactcaatagatgcaaaaaataaattgacaaaatgtaacacaataatcaaacatccatacatgatagaaacttccagcaaactagaactagaaacgaacgttcacatcctaataaagtgcatctgtgaaaacttacagcaagcatcatacttaaagtgaaagactgaaatgctttctctctaagatcagaaacaaggtgagggtgtatgctcttaccacttctagccagtgtaataaggctaaataaataaatgagtaatatccagattagaaaggaagagatgtcttaatttgcagatgacacaattatctatgtagaaaatcctaattaatctaccaaaaagctaccagtaccaatacatgtttctcaaggtggcagaatataagatcaatttgccaaaatcagttgtatttttatatagaagcagtgagcaatcagaaattgcaatttaaaaataatgtaaaaaataataaatatttaaggataacctgccaaaagacatgtgagacctgttcgctgaaaactagtaaacactgctgggataaataaaatctaaataaatagacatattgtatttatatattagaagattcaacattgttaagatataatttattctcaaattcaactatatatattcaatacgatttcaatagaaatcctagcaggcttttaaaagaaattaccaaatttatatgaaaatgtaaagaacctagaatagccaaaacaatactgaaaaaagagctaaatggaggatttacactatctgatttcaagatctattaaaaagctacagtaatcacagtataaagaaaggtaaacagagacaaatggaacaaaatttgtccagaaatagacctacagaattgattttcaacaaaggtgccagggcaattcaatgggaaaatgataatattaacaataaatggtgatggagcaaatggatatccatataaacaaatagtgaaaacaaagaacaataacaaaaaacaaatgaacttcaatccttatttcacaccagcattcaaaaagtacttcaagataaatcatagtcctaaatataagaggtaacgtataaaacttcttgaagaaaacgtaggagaaaatctcagtgaccttggcttggcacgtgtttcttaaactggacacaaaaagcaagaattattaaagaaaaataaaatggatatcatcaaaataaaaaatgtttgcctttccaaagataccgttatgaaaatgaaaatataaactacaaaatgggaaaaatagttggaaaacatatatccaagaagggacttctacctagaatacataaaactccaataataacaacaaataattataataataaatgtaataatataaaaagtatacagatgatttgaaaagtcacttaaataagatatatgaatggcaaattagtatatgaaaatatgctcaacataaatagtaatgaaaatatgaattaaaaccatacccactagaatggctaaaactgaatagctaaaattgaaaaaaccgataccaagaattgacaaagatttgggacaactggaacgtatactgatggtaggggatgtaaaatggtacaaccactttggaaaacaggttaccagtttcataaaaagttaaacatacacttatgactgagccattccacttcaaggtatttatgcaaggtatatttcataataccttgaaatgaaaagaatgtatatgtccacacgaagacttgtgcactaaagttcatagcaactttattgccccctaatagactacaaaacctaaatgtccatcaacaggaatatggataaacaaatcatggtctatctatacaacataatacaagttagcagtagaaataaactgttgatacacacacaacttggatggatctaaaactaattctgctgacagaaaccagacaaaaagagtacacattgtatggttccatgtatataaaattctagaaaatgcaaactagtctatagtgatagaaaacatatctggttgtctcaggatggtgaaagggcaaggagggcataaaggcagggattataaaggggccataaggaaagtcttgggggtgaggaatgcatttattatctttttttttttttttttttgagatggagtcttgctctgttgcccaggctggagtacagtggtctgatctcggctcactgcaacctccacctcctgggttctagcaattctcctgcctcagcctcctgagtagctgggactacaggcgtgcaccaccatgcctggctaattttttgtattttagtagagacagggtttcactgtgttgcccaggctgatctcgaactcctgagctcagccaatccacctgccttggcctcccaaactgctaggattacaggcatgagccactgtgtctggcctccccgcatttattatcttgattgtgataacaggttcacaggtgtttacctatgccagaacttgccaaattttagcagtttaaatttttgcaattaaaccatataaaaaatacccctaaaaaagaaaaaaatgggaaaacattaaaaatcgttactgctataagatcaccacgcatcctctgggtaggaaataatttctaactcttctttatccccaaatcactttttactttcattatagtacttatcagatgtctcagttatccattatcccaaaacttagtggctgaaaacagtaatttgctatttctcacatttttggggtcagctgggcaatttctctgctggtctagcctgagctcactcagggggctgcagccagctggtgagttcgcagaagctggagggtttaacatggctttggcatagatggcttgaaggcggcgactctcactacatggtctttcatcattttgtagtctaactgaatattttttttcagtgtccataaatcaagttttattggaatacagccacatccatttatttacttttttagtgagatatgattgtcagacaaataaagctatatatattcaacgtatacatcttgatgcattggaggataagtatacacctgtgaaaccatcaccatattcagtgccctaaacttaaccatcacctcttaggggactcctgtattagggtcctctgtaggggcaaaacttacaggatatatgtatatatgaaaggaagtttattaaggagaattgactcacatgatcacaaggtgaagtcccacgataggccattttgcaaattgaggacgaaggaagccagcagtggcagtctgagtcccaaaacctcaaaagtagggaagctgacagtgcagcctccagtctgtggctgaaggcccgagaggccctggcaaaccactgttgtaagtccaagaatccaaaggctgaggaacttggagtctgatgttcaggggcaggaagcatccagcatgggagagagatgaagactggaagactcagcaagtcagcttgctccaccttcttctgcctgctttttctagctgcactggcagccaattggatggtgcccactcacattgtgggtgggtcttcctgagggtgggtcttcccctcccagtccactaactcaaatgttagtctgttctggcaacacccagcaacaaccagatacacccagaaacaatactttgcatccttcaacccaatcaagatgacaatgttaaccatcacaccttgtacactattggtgggaatgtaaattggtacagtcactatggaaaacagtatggtagttcctcaaaagattaaaaatagaactaccaaatcatccaacaaacctgctactgggtatatacccaaaaaaaattgaaatcaggatttcaaagagatgtctgcattctcgtgttcattgtcccattattcacaatagcaaagacatagaaagaacctaaatgtccagatgaatggataaagaaaatgtacatacaatgaaatactatttagctttaaacgagatgagaatcctgccatttgctacgtcatggatgaatgtggaagacatgctaaatgaaataagccaggccaagtgcggtggctcatgcctgtaatcccagcacttcgggaggccgaggcaggatcacttgaggtcaggagttcgagaccagcctggccaacatggtgaagccccgcctttactaaaaatacaaaaaagtagctgggcatggtggcgggtgcctgaaatcccagttacttgggaggctgaggcaggagaattgcttgaacccgggaggcagaggttgcagtgagccgagattgcaccactgcactccagcctgggcaacagagtgagactctgtctccaaagtgggggaaataaaagtcaaacacggaagaactactcaattattccatttaggaatctaaaataatcaaactcgtagaagcagaagcagagacttgaatggtgattaccaaggtttgggggagggtgaatcagagagatgttgatccaagggtacatagtttcacttatgcaaggtgaataaatcctagagatctactgtacaacatcgtgcatatagttaacaacactgtattgtgtacttaactgaatcttcatgtggcagtcgggtacctaatgaataaatgcagaagccatgaggtctcatgggttgcccgggtcctagatattgcactgtcactcctgccacctttgaccctttatcaaaacaagttttaaaaaacagcccaaattcaaggggatggagaaattgatgccacctttctgatgtgagaaatgactatgccatattgtaaagggacatggacacggagatcattaatataatgatttgcccttccaggttatgccttataggcatttttggtacctgtatcccttctattaaatcataagttccttgaaggcagaaattagatcttatttacctttgtatttccctttgcaacgatcacagatgttgcacgctatgcaataagtgttgaatttttccggatgacaagacaagtaaaaggtaagggcaaaaaaaaaaaaaaaaacaaaacaaaacagggttgaagacgaagacgcatcgttgtagaggtaggggagaaaagatatattccaaataatttaaaatcatgatctccaaagcaggcaaaagcaaagggcaaatattgatgagccatcagagtatcttttttttttttttgagatgtagtctcactctgttgcccaggctggagtgcagtggcgtgctcttggctcactgcaacctccgcctcccgggttcaagcgattctcctgcctcagcctcccaggtatctgggactacaggcacacaccaccgtgcccagctaattttgtatttttagtagagatggggtttcaacatgttggccaggctggtctcaaactcctgacctcaagtgatttgcccgcctctgcctcccaaagtgctgggattacaggcgtgagccactgcgcccagcccagaatatcttaataataacatttttatagccaaataggtaaaggcaacagataagaagagttgagtagctgcttaagtagctagagctttatttaaatacagctcttttgattccaaattttaggctttttttccccttcttcaaattttgcaactctggggtggtattatgttaggcaattgaagggaggggtggataatttaggggttttaaattcacagagtaaacattctggtggttggtaccatgcttttagtatttatatttcccagtgtatgaaataaaagattttagagggacaatgctgaagatgcctaaaataaactttccttatttatttctaggcctttctaagcagttagattccaagagacaaagtatgttgtagagctgttctgtttagtcttttcctgaaattgcagccagtgttttgcctatctgctattaacacattaccctttgcctgccatctcatatttggcatattttataaacaggctgaaagctctaagctgaatcctggctatatcaggttttgtaattatatcttcctgcaatattcttcccactcagacagctaataaatagtttaactgactgagattcagcctttctctttgtctctgcaaaatttagaaattcaaaatgcaattcaaaataagtattttcttcatgtactttccccatgatgtatttggtgtccaacaatgaaccaaattatgaggaaggtgagtcaacagaatcatgagatccaattctttctcttgagactcttatggtatcggagagatttgcagtctatttattttttattttatttatttatttattttttggaataagatctcgctcttgtcaccaaggctggagtgtagtgacacgatcactgccacctccgcttcctgggttcaagcgattctcctgaatcagcctccccggtagctgggattacaggcgactgccaccacgcctgctaattttttgtatttttagtagaaacagggtttcaccatgttggccaggctggttttgaactcctcacctcaagtggtccgtctgcctcagcctcccaaagtgctgggattgcaggcatgagccaccgcccggccagatttgcagtcttttgggtattctgcaagctccaggattctgggattctgagtgacccacaaagttcacagtgttgctgccaagttctagtaaagcattatgttatacttttttgtttttacataattcaacgtattgggcaataagtcactttgctagtattcatattagttaatctttactctgcagtaagacttaatgtaaatgcaaccttttaaaataaaaacgttgaattattccagttgaggaaaagtgcaagtagcaatcttagagggcaagacatcagttcggtttaaattagtgaattaaattctccatgatttcgtggctccctgtggataccatgaacactctgttttacctcagttgtgccatgcctcaacattgagctcctagaatgcaaaggctatttctaattcatttgttgtgtctttggtatttgtcataatacaatactatagattattcctctttctatgtggttttaaaaattaggatcattatcaattttgaacttctgaagtcttgatgagagagttgtaaactcattaaagataaatgagtagatttaaactattcacgattcttcagggttctttttgtgccttgagtctctgaggggaatggttgctgctgataagcctagccaccagtcacgtaagaagatattaatatacagcaatttcacagctgaaggcttttgcttttccacagctatgttaatagtatttgtcatttggaatcaaacaagtccaggttattcaattcccgggggtgggaacttacacaagagaattaacttctctgagctcaagtgcccctgtttataaaatggggacaataaaatttataaaatggtgacctctgttgtagggttataaggattgaaattctatgtgtttagtgcctggtaaaatccttgacatgtagaaggtgctcagtaaattattgtagtaaaaatacaagttttttttttgggccaggcacggtggctcacacctgtaatcccagcactttgggagtccgaggcaggtggatcacttgaggtcaggagttcaagaccagcctggccaacatggtgaaacatggtcactactaaaaatacaaaaattagctgggtgtggtggtgcgtgcctgtaataccagctactctggaggctgaggcaggagaatcacttgaacccaggatgcagaagttgcagtgagctgaaatcacgccactgtagtctagcttggggtcactgagtgagactccatctcagaaaaaaaaaaaaaagacaccagtttttaacagtctttctcctcccttcaatttggttgtaaaatattcgaaaaaaaaattggaacctgtacatgttttgacctgaaaaatagtgggaaagtgaaaacattccactttccctttcggcatttattgtgtcacttaattattttaagtattgaattttcagtctgtcagacacatttctgatgaaagttaagtgtgatcagggctcactgcaacctcaaattcctgggctcaagctatcatcctgcctcagcctctccagtagttgggactatagggatgtaccactgtgcctagctttttttttttttttttttttgtagtgatgaagtctcactatgtcgcccaggctggcctcaaactcttgtcctcaagcaatccttccacctcaacctcccaaggtgttgggattacaagtgtaagccaccacgcccagctaaaaaacaaattttaaagttatttgtgccactgctactcctaaaatgaatatactgaaatgcaatgatttggatcctcccaatattttcttgtgttatgagaagctgataaagtcttatgaaactcctgtgggattattgaaataatatttaaatctaagtcttaggtcttgtgagatcctaggcaagtcatttagctcatatgaaaaatgagtactacacattattatgatctcagatttgctttaagattgaatgaaactttgcatgggaagtggctttgtcattggaacagctgttatcttataataacactgaacaggccgggcgcatggctcacacctgtaattccagaactttgagaggttgaggcaggagaatcacttaagtccaggagttcgagaccagcctggccaacatggcaaaaaccggtctctactgaaaatacaaaaaactagtcaggcacacacgtgtggtccctgctacttgggaggctgaatcaggagaatcgtttgaacccaggaggtggaggttgcagtgagctgagatcgcgccactgcactccagcccgggtgacagagtgagactctacctcaaaataaataaataaatacatacatatattcatacattacaataacactaaacatccatagggtaaaaaatgggggctttcatttgatggaaaacttcagacacagctcttttctcatgtgaaacaggactgactaatatccgctggcttcctcagaattggttaagaggagatacttgatatcccggcacctttttctgataggctgttgactgtagccttagcctttctcagcccctggcctgactcctccccttccctgggttgtctatatctaccacctctatatctaccacattttatttatgatggttgtgttgtggggtgaggtgggaaacttggcactggctaggtctcctttgcaatcagcctccctacagagaaattggccattaataattgtattaggaaacattttattcttgcagagggagacccatgctttacaaaagattcctgacatttggtagcttggcctagttctggggtgcaaaattaggaagcccatcgttgcggcatacctcagccatatttccacccctacctttatcagctgtaaggctgttatttttatcttcaactacctggcttatttattttctcaaaaagttcagaactcaaatgggaaaaagtagtattctttattaccccactgaaaagtaagggctaatttatccaagtctggttcctcacaggctggcccctgaaacactccacagaaaccagctactgctgtgagtttaagacaatcaacccaacttatggtagaattctgaagtggcggtttggttggattgatgctcacccaacctaaaatactgagttagtagaccatagacctgggctgcatatggaggttctacgttgttatgcagctgcagcccccaaagcttgaccccagccttttgattttgccaactgctaagtgctgaggtgatgacccaaaaatggaggccaaggttctgccacatcatattgctgggaccatgggtttggaccccagcccttgatcacaccatgggagcagcttatactctctcaatcatgcaaatttttttttttaaagccctacagccaaaagactgaggtttctcttccaatgcttgacgtttggccctgctagattcttctgtgctgtttgaatgcaatgggcaacagggctcacatacctgcgatgggtcttttctctgaatttctcccctccctgtcaatgttccagaagggcctgctgtgtgtgtgccctgcttgacccttcacctctggtactgtcacccgtaaccctcagcatctgttcagaaacagtgatcataattcatccagaggtctctgatgattcatccagaggtttcctaggcagggagcttgaattctgagaacttcaagatcacaatgaatgacagagatggttctttaacaccgaggtctttggtctctaaattttatgttatttgcctgggagttggtacttccataaacaactattgggtcacagagaaaggcctgattcccttgttgctgtgggaatagttaaatgccttgtcttccagaagtctttttattaaccccagacagcagttccagtgatggatttcactgtaaataagaatagctcatttttctctgccctctagagttctttttttttagtagatttttcaaaattttactgaagctgaagaaaaaaaaatatatatcaaaattgatagcacccagatgctgcagaagtagtgctgcaggtgaaagataccaggctgagacgaatctggaaaaacgggactcttgtagtcggagctccaaggaaagactggataatagaaaaggaaagatggaaaagccagaaagaaggagatgttataagaaagaaaagtatacaccacacacatatgcgcgtgcacacacacacacacacacagagagagagagagagagagagagagaaaacttataaaattttgagtctgtccattggtaaattactctgttacaagccggcaatgaaatttgaatggtagtttccattgctcaatcccatgggaagttctgagtgtgtagagcagtcaggccactttcagtactcttgggacctccgcagaccaggagggactgtgatcttgagatcttgatgatgctcaacatgtatcttggttcgcaaagcatcttcatgcaaaggatctcgttttagtttcacaacccacccgctgaagtagctgagtggaaactctccccttctacagataagggtagaaaacagtgacacctaggtccaggagtaaagatattcaccccttccgaaaataatttatgaatgatttaaaatagttttgttgggacgcagacacaggtacgggatacaaaatgtaaatgtggagccttaaacattatagtattttatttgattttgtgtttttttattattattattattattattattattattattattattattttgagatggagtcttgcttggtcacccaggctggagtgcagtggcatgatctctgctcactgcagcctctgcctcccaggttcaggcaattctcctgcctcagcctccagagtagctgggatttcaggcacccaccaccatgccaggctaatttttgtatttttagtagagactgggtttcatcatgttgcccaggttggtctcgaactcctgacctcaggtgatccgcccgactcggcctcacaaagtgctgggattacaggcgtgagccaccgcacctggcccattttggtagtttaataaccacacacgcaggaccatctagggcaagttctgagtttgggggctcccttgtgtagttccttctttttgaatctgtgctgaggatgattttctttagatcgtggcagaagtggtactatgctcattgcaggcctcagtcttaagaagtcctaatgacctcttcttttgtactcttgggaatcttaagctgccatgtaagaagtttggttgccactgaagagatcacatggcaaatccacatgaggagaagccctgagattacatggaatgagagagagagagagatagaggagaggagagaggagagagaggagggtaggggaggagggagagatcaaattggctgaaaacaatagctgaccccaggcccagctttcctgtagctaaatgcagccacaaaagtgaccactgtaaagaccagcagaagaactgctcagttgagccccaaaccagattccagaactgtgagaaaatggaatgattgtcattttaagccactaaatttgggggcggtttgttatgcagcaatagctaaccaaatagaagttagctctcagatgtggtttcttctgtaacaagaacacaaagctagtggccatggcttttggcctgggtggtgagtagaagctggaggaggctccaggagacttagtgaaggctggaagggcagtgagcagttggtattagagtctggagaaaaaacaatctgtgtcatgtagtggttgaaagtttggcaacatgttgactataaaagatagcaaatgtgtctaaagaacttggggatctgactaagagactatttccagacagaacgttgaaagtgctaactgtcttcttttagctgtgcctgataaggcacaaatagagagagaaggataaaaaataaaagtgtcaacacaggaaaactttccaacccaggacttactgagttggaaaataaaactctctccccttgcagcttttccagtctgcaaaaggttcccaaatggccttgggggaagaaagatcaaatctaagatgctaccagtaaaatggaacatgtgagtcaagatcaagtcacaggccgggcgtggtggctcacaccaaaatgctggtaatcccagcattttgggaggccgaggtgggtggatcacgaggtcaggagttcaagaccaacctgaccaagatggtgaaaccccgtctccactaaaaataccaaaaaattagccgggcgtgctggtgggtgcctgtagtcacagctactcaggaggctgaggcagagaattgcttgaacctgggaggcagaggttgcagtgagccgatatcacaccactgcactccagcctaggtgacagagtgagactccatctcaaaaaaaaataaaaaataaaaaaataaaaaaaataaaagatcaagtcacaagtgtggctataagaccctttgttaagaccccagaaagattagcagtagaacctcctagaacctcagcactagataaaagtgtttccaagaatctaaaggacatcttctcatagtactctgacccaaagtataaagaggtctgtcacaaagagatttgtgagtatagctcttatctaatggcatgaaacctaataagacttataggaatcctacatagtcttgaagagaactatattagcagaaacacagagttgtactaaaagaaacagctctgcggccataaaaaagaatgagttcatgtcctttgcagggacatggatgaagctggaagccatcattctcagcaaactaacacaggaacagaaaaccaaacaccgcatgttctcactcataaatgggagctgaacgatgagaacacatggacacagggaggggaacatgacatactggggcctatcagggggtggggggcaaggggagggagagcattaggacaaatagctaatgcatgcatggcttaaaacctagatgacaggttgataggtgcagcaaaccaccatggcacatgtatacctgtgtaaaaaatctgcacgttctgcacaagtatcccagaacttaaagtaaaataaattaaaaaaaaaaggaaagaaaagaaacagctcaacttgaaaagaggcctctggactctttctaaaggcaggaaacaggatgagaaagctattcacctacagacactggccatcccttatgggaaaagaagaaatagtcagaaagcagagtaaggaaccatgaagaaccactccctaggaacataactgtccctggagcaggggtaattggtgatatatgcctgtctggacttcagaattgctgtggactggcaagtcctgcattccttccattctccttcatttagatgagagtctgctgtgattattgtatgctggtctcactggtatatggggcgaaacaatttgtcttcagatctagaagaaatatacccaaggagtcttatctacacctggacttggtttagatgacaagatcttgaaccttgagccagactgctgctgtaatatggtgctgcttcccagaggaggtatcagttaacctaggactgaaaggatggattggatgtcacccagggacgaagcgactgtgacaagatacaagcacagggatcccatgagcttggcaggagtgtgtgatctcactgcataggtacagacacagcactaatggaggctgagcacagatggcagaactggagacaagctcccgggaacccaggtccctgggaggtggccctggcctgtggggtgaaaacaccaagtctgaggccaagagcagagctggcatttcccaggctacatgatgaagatgaagctgcctatcttttctgcttcccatttttttttctttttcttatttatttattttatttatttattttttgagacagagtctcactctattacccaggctggagtgcagtgatgtgatcttagctcactgcaacctgtgcccccgcgttcaagtcattttcatgcctctgcttcccaggtggctgggactacaggcacatgacaccacggctaatttttttttttttaatggagtcttgctctgtcgcccaggctggagtgcaatggtgcggtcttggctcactgtaacctccacctcccggattcaagtgattctccagcctcagcctcccaagtggcgggattaaaggtgtgtgccaccatgcctggctaatttttatatttttagtagagacgtggtttcaccatgttgaccaggtgttctgaaactcctggtttcaagggattcacctgcctcagtcccccaaagtgctgg

SEQ ID NO: 3205 - DNA, 1167 bp, Homo sapiens
gtaattttaggtcttgactactctgtcggcaacaaaagccttaattggcaatcaatgtgtgtaaagccatttaggaaagaatgagtgggctgcacgtggccacaggctgctcctacagtgggatcacagggaacttgctcgagaatctgatgttagaggatgttttacagctcctgttctccctgctggaaggacagctaccttttcacagaatagatccctgctcaggaacccactgtgggccaatcaacagcttcccaaaacgagtcagggagttccagaagctcccattccggtgccagctgagaatccatttggataataacggagtaaaaactctggtttggagaaagtttctgtaatgtttttctttttcctttttggtggaagggagaataaaggaggatattgcctggtaagcatgcaaagaaaaaaagtcacgccaatttcactagaattgcccagaacctcaactctggtgaactgcaggtgacaacacttcacactgtttacatgattggggcttccctggaaactgcgctgaccctgagatgattgaacatttagagtaaaacccttgatgtagttcataaaattggattcaaatgaaaagtttaatgtggagtcattcaaaaataacactaagagctcttccctgaattcaaaagaaaaaggaaggaaaacatgttagtcttagcaggagccaaggctgcaggtgggggaagatggagaggacagtgtttgggttttattatgtttacttttctcttacggaagaatagaagatggatgacttgatgcctgaggtaattcagtatgtttcaccaatttggagatggtcatttgtccatacttaagtctcagtaattatgttgaaatattataatttctgtaagctgggaaggttacaatgtggtggttgtcattgcccgggcatgcacaaacttggtcgtgattcctggtggcatgattagacagacaactgcaaccccttgacacttaattccagaaatcatttaagaatcacttgaaaaaggaatatattattgttctccttccaataaccaagtgtcttctgaaaacctttcattgtcactttctggtaattgaacaatgagaacacatggacacaggaaggggaacatcacacactgggaactgttgtgg

SEQ ID NO: 3206 - DNA, 3211 bp, Homo sapiens
caatgtgtacactttttataaaaaccaccctccaaggaccaggcactggccctctctccggtgcccacagacatccacacaggcccaaagaatcagggattgcacaagccagagcaatcgaacggttctgagtcatctgccggaagccttgccctcaatcaaggcggacgtgaagcatctacaaaggaggaatagtcaaagcagcagcggcggcggcggcggcggcagcagcagcagcagcaggaggcactttgtttatacaaagacggagatattcaccgaggtttccagtcacttctcagtgaagttaacagaactggcactcagtacttgcttagaactgccaacagactctttggagaaaagacgtgtgatttccttccagactttaaagaatactgtcagaagttctatcaggcagagctggaggagttgtcctttgctgaagacactgaagagtgcaggaagcatataaatgactgggtggcagagaagactgaaggtaagatttcagaggtactggatgctgggacagtcgatcccctgacaaagctggtccttgtgaatgccatttatttcaagggaaagtggaatgagcaatttgacagaaagtacacaaggggaatgctctttaaaaccaacgaggaaaaaaagacagtgcagatgatgtttaaggaagctaagtttaaaatggggtatgcggatgaggtacacacccaggtcctggagctgccctatgtggaagaggagctgagcatggtcattctgcttcccgatgacaacacggacctcgccgtggattaaagctggaggagagttatgacttggagcctttccttcgaagattaggaatgatcgatgcttttgacgaagccaaggcagacttttctggaatgtcaactgagaagaatgtgcctctgtccaaggttgcccacaagtgcttcgtggaggtcaatgaggaaggcacagaggctgccgcagccactgctgtggtcaggaattcccggtgcagcagaatggagccaagattctgtgcagaccacccttttcttttcttcatcaggcaccacaaaaccaactgcatcttgttctgtggcaggttctcttctccgtaaagaggagcaattgctgtacataccctcctttccttctacctatcttgccttaattaacattccctgtgacctagttggtgcagtggcttgaatgccaaaataaagcgtgtgcactggatagtgtgtgaaagtctttgctgaaagttccagagccattgagaataactgaggccgcagatgcatgaaatttgggcctgggaaggctatgctggttttggagtgtttggggtgcctgccattgcctctgccttcacctaagtctgtgcccattgtttcaggggatcttatggagcatctcagggcttcaggagccagccctcttccatccgcccggctctgcccaccaccactgccaggctgaacaggggactagtgcccaggtgacactgcacacaaagccaagggcaaaccctatagagtaaagctgcagccaccctgtgtctcatgtgcagctgaaatagtgatctgcttctgtcactgtcacatagacagccctgcatgccccctgtctcacacagtttgtaatgaagacagctccttctcatctttccataagcctgagatacaagttcagggactcagcaatgcactttaggactgagctaggaggcaaatatctgaagcttgctatgctgttctttccattccttttccctctgaaacacacaaaataccaaaggaacttacgcaacacaccactgagtcctctaactaatcatatgtgctcagacacagctcaagcacaccccttagttaagaaagaacctccatatacattaatttttttctgcctaaaaataaaattgcgttgtggcagcaatttggaaactacagcaaagtctccaaaaaaattgaagtcacccacaattccaacacacagcaatcactgctgttaatagtgatatacatccttccctattatgtgtatgcaaatagaaatttataagcattttactacaagttaatcatatccttcagtagcttatttcttcccttatgaaaaacctcccttaagatctttccaggtcatcaatttgatgtgcatagtattccactgtgtggctggatttctataattgaatctaattttagacagtttgagtaattaaaattatttctattaacaaataatagattgctaataatatatattatgctgttttggatatactaaatatttgctcacatccttaatatattttttaaaattcctaacaatagtactgttgagataaaagttgagcacattttgagacttcttccaaattggtccctagaaagttacactggtttgtactctcacttatgtcactgtttataccaccactgactgctgcctgctttattatttctttaatgagttggactgaacagtggttaatcctgactctgtttttgactgacagttaacagttacatgaaccattcatattacagctcttacttaaatttgaccaagccaggatatatctgttaggccacattcatttagggatcatgttttccaaagcaggtttgggcaaaattaatccacaggactgaaaggtatacatctgtgagttttgttctcacttccacctctaatttgaagaacactttaattgacacagaatacatttcacatatttaacctctacaataagttctgacacattttccatgaaacaaaccatcgctatattcaagataatgaacctatctatcatactcccaaattccttcttgcatctttgtaatttctcactcttccttctccctctccccgtcccatcccaaccactgatctgctcaggcaactaccaatcttctttctgtcactatagattaatttgcatttttaaagaaatttacatacatggaaccatacatcatctatgctttgtagtatgactcctgtcactcagtacaattattttgagattcatttatgttattgtatgtatcaatagttcatcccttttattggtaagtaacatttttttgtataggtataccatgatttgttgatgaacaaatttacctgttgatgaacatttacgttgttaccaagatttttgctattgaaaataaagtttttatgaatatttatatatata

SEQ ID NO: 3207 - DNA, 14821 bp, Homo sapiens
gtcaaaggtcactgagggagtgtattcagtagagaccgcgagacagacggctgtcatgtccttttcccgcagattcaaaatggtgaacagaaagcctacgtcttgaaaaacaagcagctgacagggccaacaaagggggtcatctatcttgaaatagatgtgatttttaatgctgtaagtcttaactttggcttttttgtactgctaaagagttcagtttcatgaaagcttttgttcctgatttgtagagaatttctgtcattcctcattttctctaaaccttcatgtgtcctggagaatacgcttctgccactgcctggcacacccacactttctgttatagttggcgaatgctgctgcggttgtgttctggccgctgtctaccggcataagaaagggaagcgcatgcatgtgcaactgtatacatttatattttatgagcacagcagccaggactttgaaactttagaaattattgcaaattgaactgcgtgaaaaacttgtaaacatttgtaatatattaatccataacagacacatatgttgatgtataggtgaaagccagcttacgaacattaatacccaaagaacagaagtacattgaagaggaaaacagactctctaaacagctgctactaagaaactttatcagaatgaaacgttgtgtcatggtgctggtaaatgctgcatactacgttaatagttgctttgattgggattcacccccaaggagtctcgctgcttttgtggtatgatcatactgtattacttacattgttattcattaaattcagtaatcatagctgcatgtttctgtggctatagtaacagttatgttgatgtggccattttaaaactcctattttaagacttgactggacagatttgccgtgggcaggaacctgatggattgtacaaggtctgagtctaagaatacattttcccccctcagatttccggaacgcaagacatctcagccaatgtatcattttctctgtgacagttaaaaagtaaaattttacatattgcataattccaaaccccaataggacagccaagaaaagtcctccatgtgaaaaataataatagtaataatctcgaccattctcaatttgattttatctgtcctatagttaatttttttcaagatatgaaaatcattggtagtagaatgctaccaatgctacttggtaatgctttaacatgtgattcaactggaagtggatgtgacctatttaagagatgttttattatttctgagatttctagcttttaaaagtcacaagtgagaattcgatagatccaaagagtcctttaatatgttcatcttgtggccttttactttgattatttaaaaacttctgatgagaccaactggcagagctagaaaatccaaaagaatactttgctctgagctttagctgggattttcttctctcacattattttggctttttcaggatttcagtttgaagtttaagtagagtcattcttttgaaatcctttattttattttcatgtttgttcaaatatgagtaccttatgcttccttatagttgccagtttagcagaatacgactttattatgggggcttacaagaagagccttaattatagtaacaaatcaacattttagtattaccattcaaatgagtgtatgcacatctgtttagtactttgagctctgtcttcctctcaggccttgtatgggactttcattaatgtctgagcacatggaacaaagagtgtctacgtccctttgtgttgtaagttaccagaaagttaggcagcctgcttcccatagacgtgttgttgtctccctaaagaaagcaattgtcattatcgttaagttttagaaaaaaaatctctctctctctgtctctctcagtattctttttgtagctctttcttataataaatatatggtggtactattaagcaaactttattctgatttttccctagccaggaggtacttttacattgatgagaaaaaatgatactgagcttctatgtctattttagactattacttccaggttttatggggtcatataacagatgcaaaaaaaaattgtcctgtaaagatcgtgctgccatttttgattcactccttccaaaatcattcctcacagctatttgtaaaatttgaaaagaccagaaatgcatataattgtattatttgttcagcaacattcattttgaacactttagcatttacgtgtattgtgtaagtcttcataaacttctgacttctggaggtcactcgcgtaaaatgaaattcaagatggcagccttttttttgcaatttccttttgattctaaaaaaaaaaaactcaggcactggaattctgaacaacttaggtacatttacatgatattacttgagtgatttgactgtaagactgtaagggggtcaaatttcactggagaagaaatgtaataatagttctcttagctggtagtcagtgtctgatggattcagtcctgtgaaacacaagctgaatgcaagaggcttgcaaaaaaaaaaaaaaagagggaatcaggcatagtaaaggtgggaaggggcctgctgacacggatggtgaaaaaagagaacacaaactacaatgtgaaaacagagtaagagtactttggagaagaacccataatattacctgtgtttcgctggaaaaaagaagctctgaatcacattctgttgaatgtgattaaaacaactaataacaaaatcaaatgtcatttattagacctgcactgggagttctataagaatgggaaccctgcctttttagcctagtactccagcttcatctgcacagtatctagcacttagtaagctcccagtataaatagctgacagaatcagttgaccaatctatgaaccaatcagttaatctgaaattttttcttatgtggagaaactcattcttcaatgatgccagataaataagggtttgctctaaggaagctagttattaaatcatgataaacatagcttagtactattgtagcaaattttcctggcgtttccatttatattctaaactacttcataattccttatcaatcattgattctaacctctgattaagttctaatataaaaatatccttccacaataatgacaaaaacaaccactaatatttgttaagcacttactatgtgtcaaggaactgttttacatgcattagcgaatttcatattcccaacaaccttatgaagtagatagtgttagttttccaatatacagaaggaagaaactgaggcacagaaaggttaagtagcttgcccaaggccacacagcagatattatttcctttctaaaagagcttttaaaatacatataccttgtaattttaatatcacagcagctctgaacaaaaactacttgggatatttattcatcttgtagatattaagttatatatttaaaaatgaaatgtttcaaagatttcattgtataactagagacattttagccctgtttattgaaaagaacagctttccattaggagaagggtgtgagcagtatcccattattacaaacacattgttcccatcatgccctgttgatggatcatgggtctattatcataatatcggttctacttggcccacttttttataaatgccactgcctcacagagcacaggcatttctatcattatgtggcttggttttaggcccaagtcagtaaactttataatgtttaagtgccttttttctattctattttaacttttcttttctactttactatccaaaaataaatgtagaataatgaaataaaagtaaaaaacaatcttttttttttcttaatccctatgtcaattgaagtagagagcacaagaaatgcaggcttaggacagctccagcttccttaacgctacctctgtgccacagggaagagtcaaagccagctgatgatattagagacaggcattggtctggaaggtgatggataaaatataagcagatacgtttctgggcgtgtgcttattttgtgtgcaatgcattcggttttaaaattttactgtgaatattgtctgcctaagaatgaacacagacatgtgtggtgcagaaggcactgctcgtcttggggaatcatctattgtagacatggaaatgtctcataaattgggcctaattttcatcaggctcttgactagacatttgtgttcttgtggatgtcagtgggtgcaacatgggggaagaaagagtgcacattttctctttcttttcagtactgtcatttctcactgtaatgagcacaaaaataattggacaactgagctatcagtaaaaggacacacttcagtgtgcgtcaaagaattattttacaggacaaactttaatctttaaatgtgattgtagataatttgtggtaccatctgtccatttggaattgttttagccttttctgtcgttatacagtaagtgctgctgtgtttaacattaacatttgatattttacacatttaatttctgttctgctgtgtagtccttggggaacggagcgctagtgctacatgagagagacaaagtattgatcagttaacatttcagctacatttatgtatgtcgcaaaattaatgaaaatgccagacaaaaatgtcagagtgcacaaaaaggtagaatttaaatttggtactttaatgaaacatcttaagatgtgcattatcaaaaatgtcctcttgcctttaaagtacaattcctaacagaataactaaagggagatacatattttacttagaggaacaatgaacatgaattatgaagggatgtcaactcctcaaagtaccttgtgttccaaaaacggcatgtttgaatgtttaactgttagtcataaaatacatttctttctgttcatatctggagggctactggcttcagccctctgtcctgagcagcctacgaggcaggtttcctactgagattctctccctaggttttccttggtattcatgtgttccttttgtgtcaaaaccaagaattccttctatggcaattcatcgaagccactctggttcattatttgtttttttctgggtccttttgaaatgcctagttttcctttgcttccagataatttgtgctccacctttattcaatccctattttagtaaaggatcatattcgggacaacagttactcccagaaagctgggccattatgcagaagagagaaaaaacaaagatgttgtatgcaaagaatgacatgaggcagctctgtatagccaaatgattaaaaaaaaaaaagtggaggaagcacagcaaaggaggaggaactggagttgcagaggcaatgggaatgtaataatgaccaaagacaataggctcctacagtacacttatcatgtacttccttctcgtgcagaaagtctgctgctattaaacaacatatggatttttaaaaagttattacaaaccgtaaggacatctaaagtgtctttcgtgatcaaggatcaaaaagggagaattgcttaagaagaagtatcaatgtgaaaacaaaggcatgtctacatcacctgtagtttaagtcttaatattcacattaaggcacaatgaaatgtaggataattacattgaacatattgaaggtcactttaagtttataacagaaatatctattctgaaaatttaagagacaatagtactaccacagcaatgaaattacgcttcaagtctatggcaattttcaaatgatttttatagaagagtttttgttgttattgctacaatttttttttagcgctagcagaaacgttagaaatgttctagatgtaacttttgttactttctacacaacagcaaaagagaagtactcctgaaaaccagagaaacaagtacaaagccaaaatgatctacaattggtggtcttactgtcatattcatgaatttccctaaaattttgtaaatataaactcctaagcctttttgcccatctttcttcatgtatgtttcctctgacatacacacctactaagcttactaaacaatacttccaatttaatctatacagatttagaagctacgttaaacattttctcacaaatgtgcaagtaagggaagaagaaaacctatataaaatttcactgatttaaaagatatatatttttaaggttgccctaacttccttttgcagagtcaagaagtattgacacttagaagtttctcgtaccacaattttcttttcagtaaatagattgtgcacccaattcatctggacatgctagtacatcaaattgctactcaaaatatacattttcgcccaatttatctcaactccggagaagaaatttttttcaaacattgtccaaaattacatgaaaaattgtaaattaggttttcctaagcattgcctttcatagtgcattacatataaattcctgcaattatataaaaggcccccaaagagtataaggtacaaatgagctgggtttcaggtttggtcactattggctaaaatcaaccctgaatcttaggaaatatagcaagccagataataacagaaccaaatattttctgtaatctttcctgaggagtgaggctctagttcagtttgtgggcctatttaattgtgaagttatttttgttttgtttttgtatctgctaagtccacagtgcaacacttggctcaaatcagtgcttcattctctttaaatgatgccaatgcccttttttgtttattttaatagatgtcagcaaaagggctttctgctctttggagggagataatcacataagccacagggtctgctactctctgaaaggcgtatttctcctagattttatttcatatttacaagaagaagaatttaatccctgtagaggtcattttctcatgaaatgaggaaactcatgtttcctatgatcgctgctcttccgcctttgtcctgtaacgtggaaagtagtagaatgctataattttgaaaacttttcttctgtgagtgatttgaggaaaagaaaatgatttcattttttctcaggtatagtgctattatgctatgctatagtcaaaaaattacaaatatcaccagcataattatgataccatattgaatctaagaattagctttctcatgtgcctcaatggtgctatcaataaaagttggcgtggtggaggacaccaaagcctcggtgtgtttttcctggctgtatggatgctgccccacttcacttcaagcttcctccttgcattacttatctggtagtttcagccccccagacctttataagaccctttaaaaattgttacatggtcaatattttacaactgagttgactaaggatcaaaaaattattaaataatgaatcagagatgtctcactacctgttcccagattcctaaaccaatgttcttgtcttctgaaggattttctactttgcaattgtgatttcaatcgtaaaggacagacatgctgagcaaattggcaagccatattccattgcaacatattatgaaataaagtactttgcaaaggaaaaagtttaaataaatgatctaattatataatttatgttagtaaaatgttgtaaagtaggaataataactcttctgaagggttgtaaattataacagagattcagtcattaatatgctttagtcattaagttcactctccatgtgttttcattccccgttctatcaggtaaaaattaagaaataggagcagaatgctttctgttgtccaattttcctgtgttgactagatgtgcagatattcgttacaattatgaatgtgttcgttaatttaccaagcaagaagctaacctgaaatgttaaggaagttgttcccattttactttgccccttctcttgccatcatttatcacattttaaattgtagtgagaattgggatagacacagcaggctttgctacaggtgggtctgtgagtgatgactctggtgcatcttgtactttgccgtgatgacagaggtccaacactcagcaagtggtaacactgagagatcaataacagagtagtcatcagctattggctcaaatagctgaaataacgaagagaaaatcagagaaaactaagaggcaaggaaagacagaaagcatatcaaagtgcaaatagatatttggatttgataaatcaaagtcagctctcattttaaggacaggaataaaatattttagagacaaagtgtggcctttatttgatcttaaatcagtgtttctctatattttttttttcatagtcactgccctaaggagaaaaatttcacttgagagaaattaaatactaagggataagattttctcaggggatattgagctttagagggccacaaacatctaagatttctgttgcttcccccccgccccagctcaagaaccagtttttacccccttggatgtcacattgaccccactgtgaatgcatgctccaaatgagggttaatacaagttcaactacatttacttttatactcttggtggtaaagtttagtttggattttctgtagttcgcatatgatatgaattattcccatacggaacttgtctggagaaagagcatttgtgatctttatgcaaaattattaactatattatagtccaattaaaggacaggtgtttgtttggctttatagagatcgaagaattttatcttctctcttatgcaaacccatatgagggttttcttctctgtcccaattccaagggtgcactgttggagaagtccagaagtccacatgaatttggactaagtaagataacttctgtcattatgagggtttgatgggttttatccagacattgcactgtatttataactaatagttactctttatatttttaatgaatattatgtcagagatataaacatatatttccttaggtttcgttacctattagatcttcattggaagtgttggggaagggagaaaggatttataataggagagtgatttaaaacagtgaagataattgttctactggctgttttgcatggcaagttacccagttcaccataggtcaaaaaaaattttactattgtcatttaccaataatatgtaaatatattatgttttatatcccatgtagctatatataaataatcttaatgcattttccatagttaaatcattctatacagttcctgccaagcatgcttcaggcaactctaaatgttcgaaacaagaatttttcatccagtgttgtcataaaatgtcagcaaattaaacaatactccccttagtcaattaatctttttgattgaacttaaaataatagatcaccaaggttaaaaggagtgcattaattaccacaaattaatatactggttgtatacgagaagtgttatattttgacgtgatgttagtagagtgatgggtagcactcagaaaagtaattcataaatgtagaagttcagatagctacattttcttcttctagttaggcagcaacattgaaaacttaaagagtgtcagtatgtatctggttttgtttaaattcttttcgttttgctttcattatgtttaattaacacaaaataatcgtacatatttatggcatatagtgtgatatttccatacatgtatacaatgtgtaatgataaaatcagagtaattagcataagcagcacctcgaacatttatcatttctttgtgttgggaacattcaaaatcttctacctatttgaaaatatacaataagttgttgctaattatagtcaccatatgcgggtattgaacacaaaacatattcctcctatctagctatacttttgtatgtgttaacttctggctctaccctgtcccccactgcccttctcagctaaatttttttaaatagagttttgttcttctatggcaagagcctattgcgtgcctcaaccaagaggctggtattttaagagagccctttaacctaggttctactagcttaactgagtgtgcactttttccttcattttttaattctcagagtatcagacttctaccacagttttatttctgtcttaaatcttggctgatatgtagttaaaatggaatgtttaacatatagactccaaacctccaaacaaaatgtagaggtctgtttggtaagacagatgcttagaccttggaacacatttctccacagtgggaatgtcatagatcatgacatagaatcatgtacaaagcctactagctgtagaatggaaacatcacatggagaaagtagattcagtggaatcctggcttggtgtttggaatgccagaacacatctaacccaaacccagcttcaggatagtgcaccttcctaatgcaaagataaggagcctaaaaggtggagattgtgtgggcttttaatggtgcagatgaagtcatggaatggtacaactggaatggaggttagagattattttacaggacaggagactgaagtgttaagaggtaaaatgacttactaacatagtaactctccttttcccccaatgactagtaatggaagcttcaaagacagcaacaatgagaagaaaggtgaagtttgtaagttaaattgtccttaattaagggaagccaggtgtctgacattgtcctgtagaattccaagagtgtaaaattggactcctggtccttggtatttcctgttaaggaatgtattgatctgggaaggctagaattgccgacttgatataataagtctgtatgcaccctgcttagtgttattcctgcagtttaagtaataaatgtgtaccttatgttttgatgaacttttctattagtggaaatcacatcacactatagctccacaaaacactgcagagatgtgtgtatggtaatcacgaactcttgaagagttcactgtgtgtttaagtaaggcatattttagacaagaaatatcatttggcctccaagtagtataaatgacgcttttcccaaaagtaaatgtcgactcattaagaatatatttcccaggtttcaaatatatattttcagtgagttgcttaaacagcttaaactacctatattgatctatattgattaaatggtagctaagatgaacctgtccgtggcctaaattttcattagactaaataaatgccaggaaaaagtgtatgtatttgaattacttagaaaaactggtgacccagcttcattgtatcgctgtctttctaaattgcctttaaaattatatggatccaaattattccagcgtaaaattaaacaacataatggaacagcatattcctttacaaagtagtggcagtactgaaataataatttgggcatattttgagatgatatttgaatttggaaggtgttgcccactttgttatttaaattatgtgaggtatagtttgctatacatttggtgcacagttttattgttattggagatactggagtgaagaaagataaatcatctgtatgaaatgctttgacatccttaagcagaaggacctgtggataatttagacttgaataatatttggccacaacaacataggtttctgtttctgagaactacacagtccttcaaagtttgtatcagtatgaaaaagtatttaacttaaaattattattagataatattctagactggatttaagaataggagataattcacaagaaaaaatgttccatcagtgtttgtcacaaatgcatggctctccaaaggcactgaaggcatatttaataagacttgggttctgtttctaattggctggaatgtatgacctaagtttaaggaactagaaaatacaacagattataaacggaaaaatgccattcatcagtatttttaatccattaccagagccagtgacaggaaataaactcaggctgttctgctcaagatgcatttcacttgccattaagaggacttccctcgttttcatgcacactcaataaagctgtgttgagtggctgactcagatgacttcagcagcaaaacttgaagttaaagctatactattgtaagagaaacccccaacagtagtagcagatgaagctgagaataaatgtggtgtatcaggcatcataaaagggtgaatgggggatacatttatgtcctcctctgtctgctgtgagatccatacataagattcacactcattattctcatcatcttaatgagatcagtgtgggaacatctctctcctttctctcttgactgtcagaaatgggttattccattatttctccttcctctctctgcttttaagggactagttatattttcttgaaaggccagaaatgttaactggttgcagcaggcagccccagagtgttgcatataaaggcttaaggacttttggtagaggccacaacattagtctctctcttgctcttactttctttttctctcagaaatgcttttatttcctttttgacttttgttatttgctgtatttcccaaggtgtttccctagaaaataagagaaaggataatttatccatctttcctgtataaagtacctgagtaatacctctgattgctatcacccttctcatcgggtttgctgctgtaattattttttttttacacagtcttcctaaaccaagtctgaatgcaattagttcacatgtccatgccatgcacaagcccagccttgaactcaaagaggtaaacttggcaagagaccaacttctaatgcattttatcctcaaataaatttccagatatgtcaagaaacagtcaatgtttacaattaaagctgctaagagattttttttattgtgtttgtagatggcgaatttccttaatcctcaaggacaataaccagaaattatggaaatatgatttaagtgatctaggtctattgatgattatatcgtaaccacactgtttttggaaatgctttcctttatagaagagaaatgttagaggattccctttaacatgattgaagaattttagagtaggcatttttaatatttgctgccctcttaattattacttgtttaatgcaccactgttagcacagggattatgagttaataaaaatgtcatagtgttagtgtataaaacactatataattttccccaggtaacgattaacagcataaggctatattaacaatattcttagtgtacagttcctaaatgtatttgattctcatcttttaaaaagtaattttacactgaaattcagtaataaaatattgagagatttagtgaagctagctcatggaaacttcttaggtgtgtgaattttttccggtggtttatattatattgttatgtaaaatatcattctattttaaaattaatctgagagttttaaatgttgtcttaacattcatcagagaaacgttattgagattcacaaagagcttgtttatctcatcatggtgtttgttaaagcagttgaaaaataacattaacaagccattaagtcacgattacgtcatggttttgttcacatagataataggtttccttttccctctttcttcttaaataatgtctttctggctttgttccggggctgcagcaggctgttagtatgtatctttataccatcagaatgaatgagatatatctgtataaattattgattcacttgagcctacctcggtaattcagagctgaaaactctggcagcttatctaatagaatgatataactagcagactgaagttacctaccacagcaacaattgccagttggggggtcaaatgccctttgacctttatacctgaacacctgcaaattgagctgtatcccattcagaattttaagaacaggttcattgtcacaggaagtagagtttgtttcttggagaaaattatgccagttctagttctgaatgaaggacaaggcctttattactcaagggatattagggctgactgcttttttgagaaaacaaatttgctgtaactttatctgtaatttagtcctgaatgggtgcaaatagactgcacattgtatggagcagaaagaagaaaataggggtttgttaaagccatgtaagggctatgtaaccattatatttccgagggaagtcttatcagagttgcgggttataagggggaatattttggttacatccttagtatcaaacacctgtttagagttttagtttagaatgacattggaaaagaacatttttctgtctgaaattgtggatgatgaaacacccatctcctgaaagttactaggtaggctttgacatggagactgccccatccagaaaccacagaaatgattcaagtctctacatgagattgaatgctaggcttagacctagtcggactatgttgatttgtttcacttttatagaaaatcagattcatagctttatatactctttccaattaaaaaataaatcctatgaaatattatttgcataagaatttgatttaagctttgccaatgctgaaagtaagatgaatgttttgagtaagggagtagaaaaagcatacttaccctgatgagcctccggatcacacagtatggggactaatgggtcatatatttttatttatttattggagaaactcatccctcaagttggtcacctactccttagtcagcgagctcggtaattgtcatagaaacactcatttttacagtgttatagttgatcactgacatggaaccagactaggtaatcaaacatcttagccatatgcttgttctaagttccaacctagtcaattagcacattttctattaaaaacttggttgtaataggtcttcattagccagcagttgccataattgaatagttactcaattattccattccccaacctcattttcacttcttgtcagactctaagtaggaatatttccaagaacattcatgatccccacctcaagcaaaattcatgacccgtacctcaaacaagctgttagaggttgatccagg

SEQ ID NO: 3208 - DNA, 3983 bp, Homo sapiens
gttggtagaaccgaagaatgtggaactcatggacacagaggaccaactgtagttaggcggctgagccagaggccaactgcagaggaactggaacagaggaacattttgaaacctcggaatgaacaagaggaacaggaggagaagagagagatcaagaggaggctaacccgaaagctcagtcaaaggcccacggtggaagagcttcgggaaagaaagatcctcatccgcttcagtgactacgtggaggtggctgacgctcaggactatgaccgcagggcagataagccgtggacccgcctcaccgctgcagacaaagctgccatccgaaaggagctcaatgaattcaaaagcactgagatggaagttcatgaattgagtagacacttaacaaggtttcaccgaccttaacagtcgaattcctcttgagtgctatgctgtcttcaaaacataaatttataagaaccataagtgctggtatttattcacttccccattacgatgtaaatcttctgaactgccttttttttaaaaagaagaaaaatcaaggaaacacaatcaggattttatgtgtgaaaacgcaaaagtgatggctcggcggtccgagctgctggtcccacttctgacaccaaaatgcatcccaacccccggcagtgccaagggcaccagcagggccctgactgaagactgtctggcaggtggaacggtccttgtcctctccagccaggcccagcaggcactaccttcatgaagtctccagcaaacctcttcctcacaagtgtctgtcatctgagtccaaagaaagctgaaggggtgggtttgttttgggggtactgtgcaaagctaatgatctggttggacttctacacttggccaaatgtactggctccagacatgacatttggtttgggggccctttgaagttgatgccaagaaggagtgaacacttctcagttgcccctggcttttccctcctttcagccaccacccacacaatgaacaaaagggaagggcccatttctgggggagtctggctgcctcttggctacgaaggctggcactgagcacccatcctgctccctctgcctgagctgagctgcctttcaggaagctctggtttagaaggggaaagatgtcatatgctcagttcaaataatcaacccaactgtgtccagagtgtccagtgtcatgagtgacccacgcacacacacagccattgctaaggtactcctgtgctgtttataagtctgagtgggaggaccctattgaatcctgtggggtcagaaactgcttggctgacatttattttctctgtgcgccttgaagctgattatatggcttgggagttcttagcttctgtgtataggaccagtgcatgcaggccagaaaccactcctgtaggactggctttccagccactgagggacttggaaccactccatggccttctcttttttttttttttttttttttttttttttttttttgcactgaagagtttctgtgaaggagccccagagttgggcatgtgccagaatcaggccaacaccagccacacctgtccacagtgccccttcctgctccagttgatccagagagctcctccctctaccctcatgatgccagggagcgtgactgtgggtgtgtctctgactgggacacccaggatagggtgtgcgatgaggccaggaccctcctaaaccctaacagcatcctaacgaggcccattgcagctttcgatttccttcataacagagctcgcaggccctcagttgcagagctctctcaccttctggagtgactccatcgttactccagtctttctaggtggtggaactctccaccacacatgccatttagaaagacgccagcttggcctttccaaaaagttaaccagtcgtctccccaccacaaaccctgtgggagcaggttactcttaggatgcacacccgtcaacgaggccattgcatttttttgcaggcatgaacggctcccatctaggcactaacccaggagccaaacaactgctggggagagttcagggcagctctttgggcggtgcctccagctgcagctttgccttgccacctggagccagcacgcctctgcccgacccaaggaggatgccatcactagatcctattttttttttttttttttaactcttgaatctgaatagttcctgccgtggggagaggtattgttcagggaaaatgtgatcgggattttagtgtggctgtaaacacagtcttcccgaaaggcttactgacgtttgaatgtgcaaatggtatgacgaaagatgtagggctctttcgttgaacttctctacggcgggcgggcggacacgtgttccaggtggacttgcctgccggccaggctttgagtctgaacttcctctaactgcagctgggctcctggcacacgcggtgccctggcatgatggtcctccctggccaggagcgagtcctaaggaaattcattccattgaccggactcctcccatgataggcccatggcttctctgctggccttagttcttggcccttcagattccctggggatataaggcccaagcggatctccctgcagccagccagcagacagcccagggtttccgcccaaagtgccctcatgttgcagtccactttgtgcatggaagatattgaacacaatttccactgctcttcctgcagggcctcctttccagcagtcacttgctcagactgaggggtgcacctcccctgccattgacaggtcctgcgccttcaggatgggctatttcaagcccgttttaagtggctcttacacaggctcagcaacctctgtggcctgcaggatgggccttctgctgtctctttcctttcttaaaaccttaaggtctttctagagacctattcaattttctttttttttttttttcactacaatgtcatgacaactgcagcaatttgtgttactttccaagatgacaatttgacattaattaagggaaaaaataaaaaggtgagctagatgacttaaaatgcatctcttttttgaaaaagctgtagctggcaagtcaaagtttattttatgtgtgtaaattcccagttgagcatttttttcatttggattagcgtgagaggaaaaatgtgaaatgtctcaaatcaaatgcttccttctaaagattagacattgcccaaccctgcccccgcccccaatcaatcagtgacagaagagaccgccatcagccaactagctttttttaaatggctgatatattcatctctaaaggccctcaaagcactgtaaaacttttaaaactttagcctttatgtcagattagagaaaccaaacaatgtgacggtacatgtgatgaaaagctctgggtttatttttctcccgcttatgaacatgtatttttatttgccgaatgaaaatcgtggtgtgttgctttgatgaatggaatttcaggctctccctgtgcacagccggtgggcaaaggtcaccttaaatgactttttctccctatctgtctgttaatccccagaccggttgcattttccagttgcttcctgggtgtctgtacatagtttgtctttgtataggagtgagtgtggtgaccgtcaatcccctaatctcccaggttctaatttaacagatgatggctgtatgaggaaaacgatgtaaatagagaatacaaattaaactggatctctgtggcctaggttttgtacatacagaaactgcatggtatttaaattattgtttgtctctgatgatgtatgcagtttctttaaaaacaaaccaaaaaaaagtaaaaaaaaaaaaaaaaaaattcttgactcttgtgtgttttgttatcaaccagcagcagaaaccaccaaaaatgctttgactgggaaagggaggttgcaggaatgggagaggtcagctcatctgcaaaatacatagtgagagtgagtggacatacgggacaaccgcatgtctcctctggtattattggg

SEQ ID NO: 3209 - DNA, 2648 bp, Homo sapiens
aatttacaaaccagatgaaagtatctccaaatgccataatgcattggctcatttctattaattacttcctggaagaaaaatcattcttcttagagtaaaaggacatcaacttctctgagcaccaagatactgcctaggttcccttccaggatattgactcaggagacttcattgtgaagaaatgtttactaacaaaactggaagccaatgtagaatacactaatttttgcaggaaggagtttccagtctctttttcaaggatttttttaagatacagctggaccaaaggtatgtctacatgtttacatcatttcttcttcttcttttttttttggtctggaaagattcccctttccatagtctccaaggaaggccctctagtctttccagattggttctgtttggattttgtgattcataaacagaagggaagggaaaagagaagacaagagtgaggatcatgagctagagccaaagatgtttctcctgaagccattggcttgtattgaggtattgatttataaatggcaagtacatgggagatacttttttgaaaatggtcttaaaaaaaaatgaaactgagtttattagtttacccctttataatgttgaataattgtgagttaaaaaaaaacaaaacaaaacaaatacaaacttgagttcatttaatattacatttgctggttaacctttttctttgattagactttcctcgatttgtttctttgactaagacattgaccttactgaaaactcctttatgtgtctttatagtcctgactattttaaatattgtttactgaagacatcgtgggtcagagagtgaaataaagaggaggtgaactaaatgtgcatgatagtcccttcacataagtcctgattctgtacataagtcatttaaatcatatatctagtacagtagccactggccatgtgtggcaattaaactcttgaaatgcatataccaagttcaaattgagacgtgctctaagtgcaaaatacacttaagattttcaagacttagtataaaaaatataggatatctctattcattttaacaactttattgagatataaatcatatgttgcatacttcacccatttctaatacattttcaatgttgactacctgttgaaatggtagtatttcttatacattgggttaaagtatattgaaacttcaccttttctttttacattttaatctgactactagaaagtttaaaaaatgtggctcacattatatttccattggatagcactgacttagataatggcttgtgaatatataacttcttgaagaaaatgcaaccaaagtatcctttgaccaatcaatcaatatgtatttttttcaaagttaggaattctatgagtctgcttcttttcttctattcaccaaaaaaggcatcaggtgacatctctctccctctgggttagttagaaaatgagcttggtgggtttagcttagcaaaagtaggggaagaaaaatagtataatctctatttttcaaagactttaaatgacgtaagctcatgtcaacatgtatttatgtcagctaatttctcttaggtgatcatagctaacttgctgtgttgtcttgttcaaacgtttcaaaccaggttctggtagcactctttgaatacacctttctattctatgaactgaatgttgcaaacctgtcacagagtcatagataagtagccttgcaaaggaactttcaaaatcaactccttccacttacttttagctattctactttcaccaagtaagaatcataagcctctcagaacggcagattatagaagaggtcttaaagatgttgtaatgcgaccccttcatattacgaatatgtgaaccaaggccaagagaagagagagcattgcaaagagtactcggtaagttagtcagactagaactaaggcttccttagtcgttgttcatttctcatattcccaaatcttgctgttgagcagaatcccatgaatattaaaacagctgtggctgggcacggtggctcacacctgtaatcccagcattttgggaagctgaggtgggcagatcgcttgaggtcaggaattcgagatcagcctgaccaacatggcaaaaccctgtttctattaaaaatataaaaattagcgtggtggcatgcgccagtagtcccaactacttaggagactgaggcaggagaatcgcttgagctagggagacggaggttgtagtgagccaagatcgcgccactgcactccagactgggtgacagagtcagactctgcctcaagaaaaataccaaaaatgcacatacgcagctgtacagaacaccccaaacctatcgaattagagattccaggggtggagactaggaatgtatattttttcaggtccctgggtcattttaaggtcttctgatgggctgattgttggaaatcaccgacttctacttgggattccgccctcaaatgtgtcacaattaaattctagtgtaggcattcttagtaagaactcttgattttcacatctggtttaaggcagagtggtttactgttgccttctgagacaaatccaagaaagtagaaactgtcaatacattgcatagaaatggcttattttcatgcatccctgatccttgacaaattttagttaaagcaggc

SEQ ID NO: 3210 - DNA, 4221 bp, Homo sapiens
ttttagtccatttatgtttaaggttaatattgatatgtgaggttttgttaggtatattactattaaataagtttatgggaaggtttttttttgttttttgtttctttttgagatggagtcttgctctgtctcccaggctggagtgcagtggtgcgatcttggcctactgcaaactccacctcctgggttcaagcgattctcctgcctcagcctcctgagtagccgggattacaggtgtgtgccaccacgcccagctaatttttgtgtttttagtagagacggggtttcgccatgttggccaggctggtctcaaactcgtaacctcaagtgatccacccacctcagcctcccaaagtgctgggatgacagacgtgagccaccatgcctggtcatgttttctgtttttttttaagacagggtctcactctgttgcccaggcaggagtgcagtgtcacagtcatgactcactgcagcctcaacctcctgggctccagcaatcctcctccttcctcagcctctagagtagctgggaccaaaggtgtacgccaccacacctagcttatttattttttgtagggacagggtctggatctgttgcttaggctggtctctaactcctgtccttaagcgatccttcctcctggctttcctgaagtgttgggattacaggagagagccactgcccctggcctcatttacattttaaaagacccctctggctaccttgtggagaactgagtgttccctggggtcagagtgaaagcctggtgactagcaagggggccggagcggggccggggccgtggctgggctgcagggccgcagtgggaatggagatggagaggaggtggcaggatttgggactgtccttgaggttactcattcaccattgttcccagcacagactgcagcgcctggcacattgcaggtgtggattgagtgcctggaaaagctgcaagctggtttgggcctctgtgtagggggaatgggctgagctcagcagttggtgtcaggctcctgacacgtgccatctggtttggtgaaagtctatgccgtcaagacatgctggtttggggtgagccacactggtttggagcttccgatctgtcttcatttggttcccttttgctctgtagtatctgtgcagtggcagagcagtagaacccagggttagggatggaggtaggtgcaggaggggtggccttagaggagaggtggatccaggggtgccccctcccagttctctgttcaggtctgtattgaccctcgggattggaggccctcttctcatccatcgtggtggcctccatacaggtgaatctcagcgatcccaaacagaagtatgagccatcagaccagagccatgtggactgcgtgtgtcccatccaaagggcacagcctctgatctgctgtacccgattttcttttttctttttaaggtggagtcttgctgtgtcgcccaggctggagtgcagtagcacaatcttggctcactgcaacctccacctcccaggttcaagcgattctcctgcctcagcctcccgagtagctgggactacaggctcctaccacacctggctaatttttgtatctttaatagagacagggttttacctatttgccaggctggtctcgaactcgtgaccttacgatccgcccgcctcggcctcccgaagtgttgcgattacaggcgtgagccaccgcgcctggcccactgtacctgattttctgtgaagtcagaggcctgattttcaggtgtgggcaagttggacattttttaacgtgctgcatgggcaacagaacatatctacgagccccattctgttcttgggtccccactgtttccctcctgatccagttgaaccccaggtgacagatcttccacaacagatgggtgatgagaaaaggagggatacttgggggctttgccatcactggggacccatcatccccagtgatgccaaatgaggccgattgtggcccggtgggcatggcctgggcaatcagggctcaagaccatcaagctacgcacgatgggcctaggagaagatactgatgctgtttttctttctctctgcccagtctgaagaaaggaaaagaatagatgaattgattgaaagtgggaaggaagaaggaatgaagatgagcaccaaggaaccacgtttgtggagtgagggaacgttctagagctggcctgtagtgacggttgcacagctgtatacacttcataaaacccatcagcctgtacatgtaaaattgacctcatcgatggcaaaggcaggggtgtgattgccaccaagcagttctcccggggtgactttgtggtggaataccacggggacctcatcgagatcaccgacgccaagaaacgggaggctctgtacgcacaggacccttccacgggctgctacatgtactattttcagtatctgagcaaaacctactgcgtggatgcaactagagagacaaatcgcctaggaagactgatcaatcacagcaaatgtgggaactgccaaaccaaactgcacgacatcgacggcgtacctcacctcatcctcatcgcctcccgagacatcgcggctggggaggagctcctgtatgactatggggaccgcagcaaggcttccattgaagcccacccgtggctgaagcattaaccggtgggccccgtgccctccccgccccactttcccttcttcaaaggacaaagtgccctcaaagggaattgaattttttttttacacacttaatcttagcggattacttcagatgtttttaaaaagtatattaagatgccttttcactgtagtatttaaatatctgttacaggtttccaaggtggacttgaacagatggccttatattaccaaaacttttatattctagttgtttttgtactttttttgcatacaagccgaacgtttgtgcttcccgtgcatgcagtcaaagactcagcacaggttttagaggaaatagtcaaacatgaactaggaagccaggtgagtctcctttctccagtggaagagccgggaccttccccctgcacccccgacatccagggacggggtgtgaggaagacgctgcctcccaatggcctggacgggatgtttccaagctcttgttcccctaacgtctcaacaggcgctcactgaagtgtatgaatattttttaaaaaggtttttgcagtaagctagtcttcccctctgctttctcgaaagcttactgagccccgggccccaagcacgggccgggcatagatttcctcttccacaagctgccgcttttctgggcaccttgaagcatcagggcgtgaaatcaaactagatgtgggcagggagagggttgcttacctgccctgctggggcagggtttcctgaaactgggttaattctttatagaaatgtgaacactgaatttattttaaaaaataataataaaaatttaaaaaaattaaaaataaaaaaaaccacagaaaacaactttacatgtatataggtcttgaagtgagtgaagtggctgcttttttttttttttttttttgcttttttttgctttttgtagaagagattgagaatggtactctaatcaaaaataaagttttgtagtgggaccagaaattacttacctgacatccacccccattccccctcatcctgctggggttgaaagttccagacctgctgtcgaggccttgtgtttgtcagacacccagtgtcctcctgcaaggacgcaactgtgagctgaggtgtgagcctaggagcccaggacccctgaccccggccgctgctgccagcctcagaaaggcacccaggtgtgcaggggagcacacagggcccggcagcccccaggaatcaaggatagggctaaggttttcaccttaactgtgaaggcaggaggaataggtgactgcttcctcccgcccttcacagaactgattctcacacactgtcccttcagtccagggggccggggctcaggagccatgacctggtgtctcctgcccaccctggtcccaggtaaatgtgaatggagacaggtatgagaggctgtcctcgtctttgattcccccccaaccccacctcgggcctcacgacggtgctacctaagaaagtcttccctcccaccccccgctagcctggtcagtggtcagcaaattggaagaggatccgatgggagtgtaaatgtgagacacaatgtcttgattatacctgtttgtggttt

SEQ ID NO: 3211 - DNA, 706 bp, Homo sapiens
caatgctttatgattcttatgttattttttctttgtgattgactctttcctattccctcctcttctcttaacaggtaaatattgtcacagctctaagtttagtaatgtttcctatgtttacacttgctggaataacaaaaatagcgcagctacagtgctagtgatcagccacatccatgcttgtaaacctcagttctggtctcttctctcctccttaagctgtgtcttctgctttttgcccagccacattgttgattctgcctctcctacttaataaatggtcgctgtacatcaaagatggtaaattcagagatggtggatgtgctgtttccaaatcaaagcttgtgaaagtcattgctactctttctttcttgatgaatatggacttgaagatttctctatacaacgcacccaaatatgtgttctttactcttgtcttttcccaaatactgtattttaacatgaatttgcacatgtaaatccatggtggactcattcaggaagatccatcttaagaaaaacaaaaagcaaaataaaaacaagcaagtatgaagaggagttaccagtttgtcaaagtgcatcctcctagaagtttagtacctcaaaatttcctctagataatcattcctacccatttttttgttcgtttttttgagaaggagtctcactctatagcccagtctggagtgcaatggcatgatctcgg

SEQ ID NO: 3212 - DNA, 1798 bp, Homo sapiens
ccctgagtcgctgggtgcagagccagaggaacgccagcgaccccagcagcgctgcggacggtgctggccgtggccgctgcggcccccgtgtccaggtgggccaggacgcagcctctgggcgccgtcgcttttccagcatcgcagaggcaaaagcgtggcagtgggacccaaaagtggcctcagcctgagcctgcctcacaaccagtctctgcgggccagcaacgtgattctccttgacctgtctgggaacggcctgcgagagcttccagtgaccttctttgcccacctgcagaagcttgaggtcctgaacgtgctacgcaaccccttgtctcgtgtggatggggcgctggccgcccgctgtgaccttgacctgcaggccgactgcaactgtgccctggagtcctggcacgacatccgccgagacaactgctctggccagaagcctctgctctgctgggacacaaccagctcccagcacaacctctctgccttcctggaggtcagctgcgcccctggcctggcctctgcaactatcggggcagtggtggtcagcgggtgcctgcttcttggacttgccatcgctggccctgtgctggcctggagactctggcgatgccgagtggccagaagccgggagctgaacaaaccctgggctgctcaggatgggcccaagcccggtttaggcttgcagccacggtacggcagccggagcgcccccaagccccaagtggccgtgccatcctgcccctccactcccgactatgagaacatgtttgtgggccagccagcagccgagcaccagtgggatgaacaaggggctcacccttcagaggacaatgacttttacatcaactacaaggacatcgacctggcttcccagcctgtctactgtaacctgcagtcactgggccaggccccaatggatgaagaggagtacgtgatccccgggcactgagcctaagatgtcctaacctccacccagaaccccttcagtccctgctgggtgactcagggcgtcctaacgcctccatggcctcagtttccccatctgaagaatgggtacaggaaaggattgtccttgaggccccaggaagctctgccgccccctccctgtccctcatgccgctcctcagctccctcagctcctagagggggaagaggagagacccccaacaaggggacaggacggtcactgtgccaatcctgtcatcaccctcctgtggatgtacaggcagtgctcaataaatgcttcgaggctgatgaggctgctggctcagggtgcgtgggttcctcaaggtggggatttctgagttctaagaccaagtctccatctgagactcccaaattgctccccacctcccatccctgtttttttttgttgttgttgtttgtttgtttgtttttgaaactgagtgtcactctgtcacccaggctggagtgcaatgctgcggtctcagctcactgcaacctccgcctcctgggttcaagtgattctcctgcctcagcctcctgagtagctgggattacagcacccgccaccatgccgagctaatttttgtatttataatagagatggggtttcgccatgttggccaggctggtctcgaactcctgacctcaagcgatctgcccgcctcggcctcctgaagtgctgggattacaggcgtggccactgcgcccaggcacattcctcccttctgcccctctcagggccccttcccaggtccctgatctccaggcttggcctccagagcagcccacaccaaccccaaaataaaaaaatgtatatattccttta

SEQ ID NO: 3213 - DNA, 10216 bp, Homo sapiens
gagaaacccactgacgacccttctaattgttatgatcactacccaattgtatcagtgtcattgttcactaacccagtgcctagcatggtgccaggcacatagttactctaagaaagcacagtgattgctggattctctttctccttgtacagctcttcatgtggatgtctgagctcatatcaggtgtctgaaagaggcagattctgaggatttgggtcatgatggctgccaaagcttctactcctgacttaaagggcaacaatcctaggagaccaccagcacttacatccctggtaggacatgacacctgcttatggctcagaagtgacaaaagagaattatcaggatggcagtccttataaccagatgcttatcaacattcttcactacattctgaagatgaatttctacaagggaaattgtttatggaggcagcagatggctgaaattctgatccgatgtggctggttaatgcatgatctgaaaacccctgcactggtgattttgggacagatctagaatataccaataaatatattaacataccaagtagtctaggagcagccactgggcgaacaccaaaccttgcatccctgctgctgtctctgagctcagcagacacgtctttgcagaagagttctataatggtggtacaatggtgccccctcgtgacagaagcttgaactacagcttgaacatcgtgtgacatgatgaatgaatttattgagccccaggaagaaggaaaattaaagaagagcaaagaataatagctggacagaagatgggggtcattgaacctatatcctagttgccagaccagtaaactgaccatgggacctgggggaggcagcagatgaccgaaaacctggagtgatgtggctgaataccgcatgatctgaagactgcactggtggctgcggtatgggtccaaatttttccttaacaaaaacaaaaaaagagcccaaaaccatactgactagtccaggaatagccattaggcaaacaactttttgctaccctggtgttaccgatttctgaactcaacaggtgaattcaaagatatgcctgtctttccagcatggggagctggatttgggtcagctcaggcgcatgatgttgaacagctcttatgagcttctgatagtgcccaggaagtacagaaacaactgtctacaaatctttgaactcaaggcatatcacagggacatttgctttcttcaactagatatctgttttctcataaagagaaacaatgagaaatggtttttcacaatgcctcgttagccctgaggctcagccatcccctagtgctgtgtcccaacatttaaaggccgttgaagtcccactctatgccatatactctgtacaggttttctcatttacccctcaggacagcactgtaaggatggtgtggtcagtcccatttcatagatgaccaaactcaggctttcagagcctaagtcacttctccagataggtggtaggattgaaatgaggttccatccctcatcatccatagacagccctgagtagcctcccttttagaagatgggcttccagggcttgagaaatggtcagattccacccccctgctattgtggaccaatgcgtcctcactccacaacccctctgggtgatgaagaagatagagaagattaaatcccaccatttatgccaagagacctgggtgtagggccacatgagttggttgcttctcgaagtggtgagtgggctcaggcagaagctcaagtgttggccttgggacaggtgagctggagagaaggaaagtaacatacactaaactactgtaagaaaatgcactttatatttcatctcctttaatcttaactgctattcaaggtacctatcactttgacaattattcaaatcagggtactttaggaaagtttatgtaaagcagggaataaactcttttctctccagttcagcagctaactctagaattacttttaagtatttttaagtatttttccatttttttcttgatatctccaggactctcaatgcttgaatttttctcaaggccgacagtacacacgccctaaggtgttcttcactagtatttctttttaaattacaatctatatatatcttattcatattattgaagttgaaaacacattctaaatgaaaataacactaagaatgtctgtaaaataacggggaaacattttcaaactacatctcagatgttggattagtatccataatttatagggcaaactcagtaacaaaacagttggcaactaattttgacatagaattccaatagatatagacatgaacaaggaacttgttgattatgctaaaactataagaactaataagatgctaatataaatcctcagaagaatattaagtggaaaagacagcttgcaaaaggagatgattaatgtggttgcactttttggcaaagattacgtgcatatgtaggtgaacatggtcatgtgcacctcatccacagaaacatgtctggaaagtgtgcaccattctatggacaacagaccttttgggtcaggaggtaggagttgagctactgagaggtgaagattaattacaattcatatatgtgcttttgtatattgtctgaaatttggtattcaggaataaaaatattttgatgaatatttagacacaacataacatacatttgcacagattgacaaaagtaatgtgtattatgttcattaatttgaaatagctattactgtattctatttaatggtgaaggaagtagttaagtagaaggacacaaaacaagtctcaacaaatttaaaaaatcaaaatcatatcaagtatgttctcagacaaaaatgtaataaaagtagaaatcaataacaagaggaacctgggaaactgtacaaatatgtggaaaataaacaaacagcatgctccagaatgaccactgagtcaagaaaaaaaatatggaggatatcaaaaagttatttgaaacaaatgaaaatggaaacacaacataccaaaatctatgggatacagcaaaagcagtgcttagagaaaaatttgtagcaatagatgcctacatcaaaaaagtaaaaagattccaaataaccaatctaactgttcacctcaaggaactaaaaaaggaaaaaccaaatcccaaatgagtagaaggaaggaaacagtaaaggtcagagccaaactaaacaaaatagaaactaaaaatatacaaaattttaatgaaacaaaaagttagatttctgaaaagataaaaaattgataaaccatcagctagactaaccaagaaaaaaaagagagaagacacaaataaacaacatcagaaatgaaaaaggagacactacaactgataacatggaaatacaaataatcatcagagactattataaacaattatataccaccaaattggaaagcctagaggaaatagataaattcctggacgtataccacctaccaagattgaatcaggaagaaatagaaaacctgaacagaccaatagtaagtaatgagattgaatcagtaataaaaattttccaacagagaaaagcccagacctggatggtttctctgatgaattctaccaaaccttcaaaggagaactaacaaaagttatattcaaactactgaaaaaaaattgaagaggagagaattctccctaactcattttatgagggcagcattattatgatattaaaaaccagacaaggactcaacaacaacaaaaaactacaggccaataaccctgatgaaaatagatgcaaaagttctcaacaaaatactagcaacctgaatccaacagcacatcaaaaagataatatgccgtgatcaagtgggatttataccagggatgcaaagatggttcaacatatgcaaatcaacaaacataatacattacatcaacagaatgaaggacaaaaaccatatgattatctcaaccaatccataaaaagcatttgataaaattcatcatcccttcatgataaaaactctcaagaaactaggcatcaaaagaacgtaactcaaaataataaaaaccatatatgataaactcagggctaacatcataatgaatggggaaaagctgaaaccatttcatctaagaactggaacaagacaagggtcttgttttttcaccttcatcactactattcaacatagtactggaagacctagccagagcaatcagacaagagaaataacagatatccaagttggatatctttacatttgttcctctttgcaaatgatataattttatatctagaaaaacctaatgactccatcaaaaccctcccaaatttgataaatacaatatagttttaggatagaacatcaatatacaaaaatcagtagtgtttgtatgcaccaatgacgaaatagctgatgatgaaatagtggagaaagaaattaaaaaggcatgcctacttgaaatagctaccaaaaaaaaaacctaggaataaatttaaccaagtaggtgaaagacctctacaaggaaaactacacaacactgatgaaagaaattgaagaggacacaagcaaatggaaagatatcctatgctcatggcctggaagaattaatatagttaaaatgaccatactgtcaaaggtaatctgcagattcaatgcaatccttatcaaagtaccaatgacattttttgcagaaatagaaaaaacaatcctaaaattgatatgcaaccacaaaggaacccggataaccaaaccaatccagaccaaaaagaacaaagctggaggcatcacactacttgacttcaaaatatattacaaggctatggtaatcaaaacagcatggtattggtatgaaaacagacacaaagaccaatggaacagaatagagaacgcagaaataaatccacatgtttacagacaaaactgattttcaacaaaggcaccaagaacgtacgttggagaaaggacatcctcctcaataaatggtattgggaaaattggatatgcatatgcagaagaatgaaactgcatctctgtctctcatcatatacagacatcaactcaagatcaattaaagacttaaatgtaagatctgaaactataaaagtactagacaaaaacctgggggaaacactttagtacattggtctaggcaaatattttatggctaagaccttaaaagcacagacaacaaaaccgaaaatagacaaatgaccaatatgtgtgtccaccacagagtccagggcctttcctctgcaacaccttgtcagcgtcagtactttcttcattcctctgtagcctttctcacctccctatacttggggagtctaaatggcactactttatgagtgtctgtagagcaatacttatcaaggcctacataggcacacacgctttgtgctagcatttccttttatatgtttatcttcaggacttagtgaagaatgttgattaaaatctggttacaagtactgccatcctgatatttcccttttttcacttttgggcttgaatttagaaagggagacgaaatgagatgcaaagacacaagccagaaggaagtaaagggaaatgtggttgtcagcacacacatacactcacactctctctctcacacacacacactcactcctacatcaaccaggttctgttatcacaatactacaattctctcaacatagttgttgggctccaaggggacccattcagctcaccagagcaaatagccatgggaactctgccctggattacaaccactaccagtgcacagactctgaaaagatgctatccatgtcgtgtagataatagggaatattggaacactctgaataatatggggttgtgaaaattgattatgtcacatccacagtatgaaatttcagaagagagcaaaaatgagttatattgaaacaatgatgagagatgattttttttgcctatcagattagtaaagattcacattatttctaatatgagcagaaaggaactttcacactggaatattagtagtataatgcttttattaaaagtattttgatttcagataaatgcatgggggcaagatggcagataggaggcaggaccagcttgcagctcctgctgagatggacagagcagcatgtggagactcgtactgtaaacctttgctccaagaagtactgcaggaacataccaggaaagctgagagaatccacagaccctttgaagaaactggatcactgttgcaggccccctgagatgccgaaaaactgtgagtctgcttgctttgtcagtggggaagctggtggtctgggacaagttctcagccctggtcactggttgccctgaaatagactcggtgctgttgtagggcacagtgggaatgacaccagcctttagggctgcaggctgcatgggagcagggtgaggcccatgaccgctgactttcccccacttgctggcaaactgtatggttcagcagaagcagccataatccccctgggaatataactccattggaccagacaccacacccccatcccccacagcagtcacagcaagccacacccaaggagaggctgagctcagccatgcctatccctgcccctaccgggtggtctttctctacacaccctggtagacaaagaccaaggtcataatctcttgggagttctatggccctgcccaccgcctgagaaatctgaatacttaaccagctgtccctagggaaagttggcatcctctctgcaggaccacaactgatgcactcttgaaatcaccacctcctagctggaggccaaccaacacaaaactagcacactaaaccaaaatacaaccaaggacccttacagagtccacttcactcccctgctacctccactggctgcaaaacctgaagatggatcacatcacaggactctttgcagacactccccagtaccagcccggagcccagtagctccactgggtggctagacccagaagagcaaaaacaatcatgacactttggccctcaggaagccgcatttataggggaagggggagaacaccacatcaagggagcaccccatgggacaaaagaatctgaacagcagctcttgaattccagatcttccctctgacatagtctacccaaatgagaaagagcgagaaaaaaatttctgctaatacgacaaaacaagtttctttaacacccccgaaacattgcactagctcaccagcaatggatccaaactaagatgaaatcttggaatagccagaaaaagaattcagaaggttgattattaagctaataaaagaggcagcagagaaagatgaagtccaacttaaataaatcaaaaacgtgatgcaggatatgaaaggaaaattattcagtgaaacagcataaattaaaaaaaaaacaattacaatttcgagaaatcggggaacatatagagaaatgcaaaacgcactggaaagtctcagcaatcaatcgaacaagcagaagaaagaacttcagagctcaaagacaggctttcaaattaacccaatccatcaaagacaaagaaaaaagaattttaggctgggtgtggtggctcacgcctgtaatcccagcactttgggaggccgaggcaggtggatcacgaggtcaggagatcgagaccatcctggcaaacacggtgaaaccctgtctctactaaaaatacaaaaaaaaaaaaaattagccgtcatagtggcaggtgcctgtagtcccagctactcaggaggctgaggcaggagaatggcgtgaacccgggaggtggagcttgcagtgagccaagatcgcgctactgcactctagcctgggcgacagagcaaaactccgtctcaaaaaaaaaaaaaaaaaaaaagaattgtaaaaaaaatgactaaagcatccaagaagtttgagactatgttaaatgtcgaaacctaagaataattagtgttcctaaggaagaagagaaatctaaaagtttggaaaacgtatttgagggaataatcaaagaaaacttccctggccttgctagagatctggagaaatacaagaagttcaaagaacacctgggaaattcattgcaaaaaagatcattgcctaggcacatagtcatcaagttatctaaagtcaagacaaaggaaagaatcctaagagctatgaggcaaaagcatcaggtaatctataaaggaaaacctatcagattaacagcagatttttcagcagaaaccctacaagctagaatgaatttgggtcctatttttagcctccttaagcaaaacaattatcagccacgaattttgtatccagagagaaactaagcttcataaatgaaggaaagatacagtctttcccagacaaacaaatgctgagagaattcactactactaagccagcagtacaagaactgctaaaaagagctctaaatattaaaataaatccttaaaatataccaaaatagaatctccctaaagcataaatctcacaggacctatatgacaataacacagtccaaaatatatgtatgtatgtatatatatatgcaggcaacaaatagcacaatgaataaaatagtacttcatctcagtactaacattgaatgtaaatagcctaaatgctccacttaaaagatacagaatggcagaatggataagaattcaccaacctagtttctgctgtcttcaggagattcacgtaacacataaggactcacataaacttaaggtaaagggatagaaaaatatattccatgcaaatggacaccaaaagtgagcaagagtagctattctcacatcagacaaaacaaactttaaggcaacagcagttaaaaaagacagagggacattatataatgataaaaggactagtccaacaggaaaatatcacaattctgaatatatatgcacctaacactggaccttttgatttataaaacagttactactagacctaagaaatgaaataaacggcaacacaataaaagtgggagactttaatacttcactgacagcactagacaggtcatcaagacagaaagtcaacaaagaaacaatgtacttaaactataccttataacaaatggacttaacagatatttacagaacagtctacccaacaactacagaatatatattctattcatcagtacatggaacattctccgagatagaccacatgaaaggccacaaaacaagtctcagtaaatttaagaaaatcgaaattatatcgagtactctctcagaccacaatggaataaaattggaaatcaactccaaaaggaaccttaaaaaccatgcaaatacatggaaattaaataacttgctcctgagtgatcgttgtgtcaacaatgaaatcaagatggaaatttaaaaattctttgaattgaaagataatagtgacacaacctatcaaaacctctgagatacagcaaaagcagtgctaacaggatagttcatagcattgaatgcctacatcaaaaagtctgaaagagcacaaatagacaatctaagatcatacctcatggaactagagaaacaagaacaatctaaacccaaacccaggagaagaaaagaaataacgaagatcagagcagaactaaatgaaattgaaacaaacaaaaacaatacaaaagataaatgaaacaaaaagctggttctttgaaaagataaataaaactgatagaccattagcaagattaaccaagaagagagaagtttcaaataagctcaattagaaatgaaatgggagatattacaactgatatcacagaaatacaaaagattattcaaggctactatgaacacgtttatgtgcataaactagaaaacttacaagagatggataaattcctggaaatatacaaccctcctagattaaaccaggaagagattgaaatagtaatacaaagattgccaataactaaaaaataagttcagaaccagacagattcacagctgaattctatcagacattcaaagaattggtaccaatcctattgacactattccaaaagatagaaaaagagagaatcctcccccaaatcattctatgaagccagtttcaccataatatcaaaaccagggaaggacataacaaaaaagaaagctacagaccaatatccctgatgaacatagatgcaaaaatcctcaagaaaatactaatgaaccaaattcaacaacatatcaaaaagaaaatccaccatgatcaagtgggtttcatgccattaatgcagggatgatttaatatacacaagtaataaatgtgatagagcacatacac

SEQ ID NO: 3214 - DNA, 5158 bp, Homo sapiens
ggacaattgtgcaggcccccaggactttcgccccgggccagcgccctgagtgcggagccgaggggagctcgagaggcgccttctgtttaccttttatggttaaaataacagcttagcaaagaagcgacttcagaagaagcgatttagtgaaatcgtctcaagctgccgcagctcagccagtttaatcacccccagagagccgaacaactgcgagcgcaatgggacacaaaatcatttttggtctcggaaagagggtcgtggtcccgcacggatgcgcttgttgggagaaaccttggagattcacggcaaggcgtaaagcctggggcttccaacggtgactacggcacagaggagagttactgagtgcctctggggaggagcagtagaaagggtccattggctgatctgcttgctctgtgcttcctcctggccacctggccatctcctgatgcctcggggatactctgggcagggatggaagcctagatgcctcaccgcaaggagcggccgagcgggtcctcgcttcacacacacggcagcaccggcaccgcggagggaggaaacatgtcccggctgtctctcacccggtcgcctgtgtctcccctggctgcccagggcatccccctgccagcccagctcaccaagtccaatgcacctgtgcacatcgatgtgggcggccacatgtacaccagcagcctggccacgctcaccaagtaccctgactccaggtaagagataagccgcctcttcaatggcactgaacccatcgtcctggacagtttgaagcaacattatttcattgaccgggatggggagattttccgctacgtcctgagcttcctgcggacgtccaagctgctgcttccggatgactttaaggacttcagtctgctgtacgaggaggcgcgctactatcagctccagcccatggtgcgcgagctggagcgctggcagcaggagcaggagcagcggcgccgcagccgggcctgtgactgcctggtggtgcgcgtcacgcccgacttgggcgagcggatcgcactcagcggcgagaaggccctcatcgaggaggtcttccccgagaccggagacgtcatgtgcaactccgtcaacgccggctggaaccaggaccccacgcacgtcatccgcttcccgctcaatggctactgccggctcaactcggtacaggatgttctataaaaatggcccagagtattttcaacaaagcgtgcttcatttgacacccagagtctgactttggattcgaactaaacccaggcaacaggcgaggcaggacagaggctgagtggaaaggtggtctggagccccttccctctccctgctgacctgggagtcgcaggcacccaccagctgccaagagaatccctggaccggctcttcctggatgggtccaagaattggacagctcagatggagtgagggcctattttccaacagctcttcgcagacccaagagcttggcacatttccgggttagggtggaatgggctttgcagggaagagggccccctgtgcacgcattccacagcctgtcggtcagaacttgctagttgcaggagacgggtgttacacgcagtcatcagacctcaccctcacagaggcacaaacccacatagttgtggacgcctgcagagactcaaatattgagaggacttctcctttttctctccctccagagctcccacgagctgatgcacccccaggcttcaaaccacctggaatgcacagctcagggaagctggtggatgcctagaggctgaaggacagggaactctccattattggggcaggactcagggaggacacttggggccatgtgtctggagagagggcataggttacaccctacagaataaagaagggacccaaagcctctttttgcctcccggaatcaaggccctgagggcagcaggatggtggcctgggtggggtcgtccaactaggtttgctaacctgaggggtcactgggcctggccacttctgtccctctggtggtggaacccagcacgtggttctgtagggacctttgtcagtgagcaagactgagatcgtcacaggagaaggtgcccttgctggctgccccagcaggcacccacctccctgccaggccaagccaggtgtcctcttgcagcttggccttgatgacctctgtttcttcctgggcaggtcctggagcggctgttccagaggggtttcagcgtggctgcgtcctgtgggggcggtgtggactcctcccagttcagcgagtatgtgctttgccgggaggagcggcggccgcagcccacccccactgctgttcgaatcaagcaggaacccctggactaggccctgcttcagtgcccacctgggcccccccagggacctggaaacagtgctggggagttctgcctgtgtatacttggccgtgggcatgagaccgagggtgaggctggagggtccaaagctggcccagcgagcaccagggtcccaggtgtcatggcaacagaacgtgggatgctggaggcatgcctgcagaaggactgttgatgcgacccaaagatacagcggtgggatctctgctgccagctctcccagcccctcagcttcgcagcctggcgcagcatcctctgaggccccggggcctgttggggcggggttggaagagccgtctgcagctacttcagaggagctgtttatccctctccacgcggggcagactctggcgggtctcctagcgtccgagagatggcttattttctacagtatttaaaatggatgcagccctaactgcaaaagtcagagaggctgacaaggaccaatgcttctttatctggtgctcagttctcagtcagacgtgcagcatggctgcagggtggaccagctgcctggcattcaggcccagatgcctgcagggctggggctctcgggacagatgcagggatgtgtgctgcagggctgctgggaggagagtggtgggggcctgagggctgagtgattctgtaaccacctgagaccttcacgtttgctgccgttgggggctcaggctgcactccccgggtcacctgacctgctgcccaggggcttccagtcctgtctgtgtggactggcacctgggctgctggagaagtctcctcccgttcggaccagcctcagggctgcacgttacctcaggaatgggccccaccatgaaggggcccatctgtcagcagcgtcttctaggtccccagctcagggagccatccccagctccagttttctcatgcgaatatgcacagttttaattcacgttgttacactagcctgccgatgagacccagacacaggcagacctggcgctcttgacccctgattccagtgaggactggccctgaggagtccttgcagacctgctgcctcccccacgacaggcccaaagatggaccccccctggccttgtgacagctccccaagtgttctccggtggagaaactgcagaggactggtgggcggggctccccagccatcaccatcctgtgtacaatggctgtagacttgtatatggctcctttaatattgtaaagatgctgatgtacaattgtcgtgcatttgtgtgaacacattgcgttcccagtccatgccataaatgatgctctcaagcaaaagactggaggctctgtcctgtgcagaagcagcagccagactcccgcattcgatgttgtgcagggaggtttgggggcggaacggattcctcccttggatccttcagttcccatcgaggaataacccgcagcagtggtggaggaaggtcagtggctgggtcctgagcttggtgttatttattgcatttgggtgcctgtcccctcagggcagcacagattctgaattctgattcacagtccctagccagatgggaactgggaaagagacagaaggcgtctgggtgcttttgaaccctgtctcaaatgtttgggattttctctctcactattctttggttggggatgatgtcctctttagacccccacgtaatggtatgagaaggtggcaggcagtggctcagccagccagggggcaccaagtcatgcagccagcgtgagacctgcagttcacctaagcacagaacgagatctcagtatgcctccatgtaaacagattcacataggcctccaatttcaatgagaccttttgcattttttctcaaagcccttatgttctaacccatgagaaccattttacctgccctctaagggccaccagcttcgacctgcctcaggggacagcagcacagaccagtggctccctgtccaaggccgcagagcagacgccatcccactgtacaatcgaatttgctggacaaacttgataggtttctctgcttagcaacgagcctatagttagttggcacatctgcgttttggcatctgaggctcccatctgagtggaggagaaagtgttgtgtttattagcaggaagtcttgtgaaaacagctcgctgctgtgtatgtttatggatttttctgatataacagccagcatggttaccgagtggtagagattctcgaacattctcaaactctctttttgggtaaatgattgtgctaaaaataaaatttattaataaagaaggggaaaaaggagtaactctacctgactaaatgttactctaatttatttatttctttactaattaagtaaaaccaggaagtatgattttacatcaaccagagaatttctgaatttatagggaaacactatgtccccataatgatgctataattctaatatatctagtccccataaacagtaagtacaaattatcattcctttaaagcatttttacacttcctggaatgagtatattatcagcaatcttttgtcaaatgccagccgtataaatgttacttctgctctttgtaaacctcaaaactcattattcttgattataagcaactggacagaaccatgccaaagcttccccgtttcccaccaaacccctgccagtgagtgcagagaactcgcaaagccacagcaggcggtctcagccaccgtcccgctcacaggggcccaatgccaggtcacaacactaagaatatctttcaaaaaatgtgtcttttttttttttttttttaaagctactgcttgactgttccttagaataaataaaggatattttataaattaca

SEQ ID NO: 3215 - DNA, 3367 bp, Homo sapiens
aggtgacttacggatccttgtgggattgagtcatgcttttcatactgcacagtcatgaagtttgccctttgtttagtagatgtagctgaactttgaaaaggggacctcgtcatctattgaaaactattagtagaaaagaaaagaaacctctttccttgtagctggctgcacacaaggtgagtaggccaggctgctgcactttttcgatcattccgccaattctggatgtctcactggatccaggactcagccactgtctttgctgctctctttgttcatgactactgcgtcaggtctgtattccatacctgctcatgccacaggcactggtggatcccttggacagtgaccttatgcagtgatgttgatcttactccccttgctgttcatgaaggcatatagattatttatttatttatttatttatttatttatttatttatttatttttgagatggagtctcgcactatcgcctgggctggagtgcagtggtgcaatcttggctcactgaaacttccgcctcccaggttcaagagattctcctgcctcagcctccctagtagctggggttacaggtgcctgccaccacgtccagctaatttttttttgtatttttagtagagacagggtttcaccatgttggccagactggtctcgaactcctgaccttgtgatctgcccgtctcagcttcccaaagtgctgggattacaggcatgagccaccgtgtccagccggcatatagataatttatataaaactggtgaaagtctagtaattttggagtttgtatttcaacgcccttgaaggtgttgacaaaggaaactgcagggcaaaggctgttaaattggaaactgaaaagtcactgtttgcagatcaagtcaaacaacagagtgactcattagtggagagcaaagttcaaaactctactgagtgtttgggaatgattgtgacacacaatttgctcagccttgagatctgcccttgtgtctttagggcccagatagaatcaccaggatgaccactgcaaggagggtttagaaaccaatcatttgctatgaagattatggaatcagagagagctcttggagatggtacagctctacctcttcattttctatctgaggaaaaagactcagagatacttgagatactaactgacacccccaaagccacaagctagtaagtggtagaactgggactttaacccatctcttctgaccctgcattcagtcagtttctttaagttgtgactaatagtcagatactttagtgagtatatttcatttatagacagatgccagtcaaaaaatccccactagtttacctgaatatttaactcaaaaaaagcaccttcgttgctggacctctataactgctgtcacatgttagtggccttaagtttacctgttgaagacctacagtctcaaagacaactgtctcaaaggtgacagtttgttggtagcactgataaaattgtattagaaattggctgtaatatctgcaatgttgtagaattttaaaaaataatccaaaggcagacagctctgaggaaataaatcccacctaccttggtggctttgtaaccttgtgtattaattgttctgaaaagtctgattttgaatctgtaaaatggagttgatacctaataacttcttatttctggggggcatgtgcggggaggattcaaggatgtaagtaagagctagcatattggctgctacaaagtagcagtttctttcctttatgagtctctgggactccatatttgttgcattaatcttctttgtcatatcaccaaccagtggtttctagcttttgtttcactactgcttaagggcagggtgttgtgacaggggaggattccctgtctcagtgtcagggtattctcttttggacagttctaatgttcgaagattttcatattgtgaaattctgctcccatgatatataagtactgcttcttaatcttctctctggagttacccaggataattctgaacccttttctacatagtatccctttaaatatttgagagcagttttgaagactatcttagtgactttcacactgttcttcaactgaaattatttctttggcagtcagtccaggctttgtcagagaagtggagctttaatgattttggtctgtatggctgattaaaatgggaacttaggttgcattggtgggcttcttcaggcttgttactactgcacagcacaggactaattgtcagaatgagtccttctccttgttccacagttctagccatatgtacaggcctacgctttgacgccagttctgaatctaagaagggagtttgcaaggagccattggatctgtccgaagttccattcttatcgttgttgccacaaatttctcaaacctcctgcctgaactgcgctcctggttggccagggtctttggcctaggtgtcagattcatgcttgcccagatcttgttgagctttctgacattttgttcccaaatctggcctgggttcttcactttggcctgaggaaatcgtcctggtgttaacctcttagttggcatcaacctatagttcatgcttttttctcctcattttcctgaatattttcaagccttctgcctggaactagccagctttttccccttcaagtcctctaacaaaatgctactgggagtatggtgagtcctgctctcagggcctggcaatggaattggctacttttctgttggagtaattaggttggcagttataaagaaagctagaaagacttggcatttttagcctgagacctctgactgtatggttaaggtgtgaggaaacgcatgcctttctagatcacttccatgtatattctctttcctccctgagggttttttttcttaattctctattcaggtcaggtttgcacttccttgtcctttttttcctctgtgctatctttgcaagtctgtagttgtatgatcaatctctagaactggaatccctgggttcaaggacatgagaatgtacatttcctatgattcttgccaaattgccctccatagattttgtaacaatttatactcttactaagaatatatgagtatatcttttcacgtaccttcactaatgttaggttttatcaaacttattcattctgccatgttatggcttaatttgcatttctttatactggagtaagattggcattttgttatgtttactggccttttgtatgtcttctgtgaactgactggccttgggatattttttttttaaagctctcaaggtgattaggatatgcagcaaagtttgagattagcaattgattagatatggggaaagctgattgtgtcaaagaagcttccaaactctgccattaacagacaaaaatac

SEQ ID NO: 3216 - DNA, 549 bp, Homo sapiens
aaaaaaaaaaagctatttgtgaggtaacaatctaaatatgtttgagctagtgcaacagtaagttaactccttacatctgttaattcagcaagcactaacaagtgatggagattaaaaaaaaaaaaggaatgagccacagctttgccatcaaagacttcagcgtctcttaggggaaacagatgtaagcaaataatgacacgatttagggcagagatatatcagaagatcagcttgcctgtgcgtgggggaaatgttagggaagtttgggttatccaggctacaatgtgtggaaagggatttcgcacatacaaacaacagagggccaagcgctggcccatgtctgtctccaagtctttgaaacatttctcacagcactagagaaaacacagtgtggttggacaagaccttgggaacatgggagctgggatcagaatgtgtctgtgtttggatgtcggagttgggcaacctcttggctcggatatttttctgttcgttttgtttaataatctttaaaataagcatgacaactaataacatttattggatatg

SEQ ID NO: 3217 - DNA, 2193 bp, Homo sapiens
gattgctgatcaagaaggaccctgcaaagctggagatggggtggagtggggcagtgctgcacatgggaagagcaacagactagaagccaggtctgtctggcactagtcctgacttcaccgcttctgagctgcgtgatgttgagtgagagtctttaacctccctggcctcagtttcctcattcaccaatcagtatgtaaccccttcccctcccttccttctagggttggcaactggatcaaatgacattagatttgaaaagactttaaaaagtataaaagacagtacatagatgggaagtcagtctttaagcctgctttggattttccagcatttcagctccagcaggaggagaaagatttactttctatttacttatcactgttaacaagcaaacacatacaagtcatatgggtgtgtgtgtgtgtgtgtaatcttttaacttttttaaaagtctgatttattgaaatatatttacatatagtaaaattcatccttcttatgtgtacagttctgagttttgacaaaaaatacaatcatgtaatccttaccacaattaagatagagaacacgagacatagaatacttccatgacctcttcacccccaaattccctcacacttctgtcatcaacccattcccctactcttagcccctggcaatattgacctgttttttgttcctattttctacaatgtcatatgaattgaatcatgttgcctttattgtttttagttctaaaaacaacattattgaggtataactgatatacaataaaatgcacatacaaaagtatacaacacgtaagtcttggttatgtatacatttgtgatatcatccccacaatcaggacagtgaacatatacccatcaccctaaaagtgtcctcaacttctactgtcactgcttttcagcaaactgatggttctctgcatgtactctgaggcacagtgctcactcccactgttatgccctccttcaggtggctttctttcccttaagctaccacctggcccttttgatctctccaaatcctgcccatccttcaagtctacgctttagccctccccaccacccaatgtctaaagggtcctttaaagttatcctttgagaataattcagcccacacttgctacttccttctctactcctaatgtacttacagacaacctctcattgtggtctttctttatataacagtgtttgtatcttactgtcctaaggtgagtggcccagtgtttagcagcatggtctctggggttagatagttaggttcatatagttaaccttaggctcctgtttaacctctgtctctgtgtcatttttccttatctgtaaaattaggaagacaatacagtatctaccacaaagggtcttgtgaggattaattgggtttatctgcataaagcacttagaaaagaatcttgttatacagtaagcacttaataaatgtccactggcttcatcagtaccattaccgttgaaagccttttaacagcaaaaactacaactctcactgtgtccacagtagtgggcttgtggatggagctcagatatttgttgggcttttgatcaagggaccattccagtgaatcagaaagttcctgtgaccacttaacatattacacgcttgcttgtgtactgctcttagatgatataaaaacaaatcaaattcccaaaccaaaaagctgcactcttttgtctgggtaaatacagctatgacatgtctatttccatggtttagaatatcaccagtgggaatctactgtggaaaattgagtacaacactatcatcatatgatttgttttgctcatatttggctgtgccattggctgcggagccaggcagcgaactccacacaatgaggagcctgtgaaaacgcagagaaggcaagaaaggatgcaaacatttaggcagcatctgatggtagctggcttgtggtttacctggcctttggttagataactgtgcctgatccctatggccaggaaggaaggagctgaagaattcacatttgggctgatgggcctggggtagggatgaccaacagaccacatgcttcttgtctcttctactccctgatcctctgatagacagggctaagtgatcatccactccttccaccctccagcctccgagtgggccacttttcaagcatggaattccaggttctgcaccctcggattcaaccaacc

SEQ ID NO: 3218 - DNA, 6340 bp, Homo sapiens
gcagcagacatggtgctaggactccacacgtcctctcagtaaatcccaggagacaggaccccagaggcattgctctcattcagtgctctcgcctccctcctggattgcctagtcagagtgagacatggagaggggctgatgtaaccaccccagcaggagtaaggaggctggaaggaggaaaccagtgatgaaggatttgccataaccttgtcctggatggagagccatggccaaagtgggtggagaggaatggccatgcaaggcagctgtgatggattcacctctgtgcaagacagctatgacggagttgatagaaagtgtgagaacatgggccacccctccttggatgttttctttccagattggaatggtgtgattctaagagtcctgggacagaaggagtattggaggtgtcaaggggctggaccggtgaggacaggagtcgaatgtgcccctgatctctgtccctctcctcggggctgcagcccttgtgacatcgaagtgccccaccccctccttcggcttccctcgctgctgcgcagaggccactggagggcgctgtctcctcacacttctggctgagctcacctccgctgtctgaacctccttttgaggctggagagaaattgagaggcctggagccagtgtctgggaggcctctggacacagctggacccaccgaggccacatggggtcagtaggatctgagcctgtggaaggaggtgccagagcaatgactaggagtcaaagtcctgggcttcagggcgagggcttgtggtgagctctggacaaatggctttgtctgttcgatcctcagtttttgtatctgcagactgtggagagtgacccaccttatggcactgttgtgagaagtgctacaaatgagaatgtacatgtgagtgcttcaaagaactcagatgttctccatgccagagtgggttttatttatttatttattttttgatggagtcttgctctgttgcccaggctggagtgtgcaatggtgcaatcttagctcactgcaacctctgcctcctgggttcaaggaattctcctgcctcagccttgccgagtagctgggattacaggtgcacaccaccacacccagctaatttttgtatttttagtagagatggggtttcaccatgttggccaggctggtctcaaactcctaaactcaaatgatccacctgcctaggcctcaaaaagtgctggaattacaggcatgagccatctcacctggctaatttttatattgttagtagagagagggtttcaccatgttgaccaggctggtctcaaactcctgaccccagatgatctgcccgcctctgcttcccaaagtgctgggattacaggcatgagccaccgtgcctgatccgccagagtaggtcttgatggttatcacccttgaagaatcatccagtaacccaaggagaagatcatttggctagggccccgtatgaccttcaaactggcataggcactgaactgttccttacgttctcacaacagccccaagaggtatgaattattatcatctccatttcatagctgggaaaacccaggctcagagaggcgccatagctccccctgggtcacccagccactgggtggccttaccggaattcagacccaggtctgtttggctccatagacttgcttaaactactggactgtcccgcactggcccatgccaagtcaggaaagggtttgatgtgacctactaaagtccctcgggctgaggtttcagctgagtgtcctttatttagtcctttggaggtgtggacccgtatgtctttggtatggatccacatttcagtggggtcagtaactccctggattggttttgccatttttttttctccccttggacttatacgcatgattcttccccctccctgggaagcagagctggccctgtgacataggtggctttacctgcagcttgacctctttacctcttttttttttttttttttttttgagatggagtctcactctgttgcccaggctggagtgcagtggtgcaatctcggctcactgcaacctctgcctcctaggttcaagtgattctcctgcctcagccttcccagtagctgggactacaggcgcacaccaccacacctggctaatttttgtgtttttagtagagatggcgtttcaccatgttggccaggctggtctcgaactcctgacctctctcaggcgatctggccgccttggcctcctaaattgctaggattacaggcatgagccacggcacccggcaaccttctcatatgagtggcagatgggtggaagaggctggacttatgtccattcacaggctccccaccctggtcagggtgcagggtatttgctgtgctggaggacatacctccatgttaaaatgcccagttgaagccttgtagcttttttcacttcttattttctatcttgatgaaagattgtgctgtcggcagggttgtagttaagtcgaagtgtggctttgttttcacaatttctgttcactttcctcccactcttaggcagcttgagaagggtggaggggtggggaaggagagtgacagtgggtgctggaatctcccagcctggggggttcttgaagttccacagtcatggaattgtggcgctggaagcgaccctcccagggcacagaggaggcaactgaggcccagggagaggacccagaccctcccaaggtcgcccagctagttagcgacaggctgggaccagaatctgcctttctgctggtcccacgccaacacatttgctaagtcacccaaagcctggagtgtggttagtttagaaaactgagacaaggagccaggggatgggacagtggagcggggacagggaggtgctgaccttgtgctttgaaagcgctagtggggagttgcttgtcttcatctgacgtcagcccctggacaaataatggccacagaaagcaaatattatgagagtccttgtgtaaacacggagctggtgtttcagtgtcagaaatgggccgaggactccaggctctatcagaccagctccccagcgctgcctctcagcaaatgtacctctccctgctggggaagaaggaccttcaacaaagatggggggcagagtccccctaagaggccacagtggggcagaaagggagaagctaggagggttctgggagaactgagaagatgcagcatacccagggactaaattagtttagggatgcaggaagaaaaacctgtcaattaccaggcacccatcctgtgtcaggcctgactgagccctttatagacattgtctcatttaatcttcccaggagctctaagggataggcattgttgtccacattttgtagataagtacattgaggctcagagaggttaagcaacttgtctgcagtcacacaggtgggaagtgatagaacggggatttgatctcaagtctgtctgagtccactaccctggtgtgttttgcagtctggaccaagggcctttcttcatcagagtcaccaggaaaccttgtcaaagaggagatacccaggccttgcaccagcctttggggagggcctgagagtgagcatctcccagggaagaggaaggaggaaggctgctaacacctgggaataatcgctcaatagcaggagcagctaaatttttccttaaagggctagatactaaatattttagactctgcagacctttagtctctgttgcaactatttggctctgttaccgttgtgtgaaagcagccacagacaatacgtatgtggatgagggtggatgcattccaacaaaactttatttacaaagtggcatgctggatttgtccctggtagtttgctgccccttgtctatagcatgcaaagtgcccccatagcctgtctctctggttgtcttcccagcagccctgtgaggagggtatgattttctccgttctacagatgaggagatggaggcccggggaggttagacatccagggtcccacagaaagtggatgtcagagctgggagtagaattagacctcctgatcccagttcagtgtgctggaaagtatgagcctggtaagaaggtctgggccagggagattgctattaagtaatgaaagcagccaccactcactgggtacttgccatgtgctgggcactgagtcatgacctcacataagctgctacccagatgttgaatgtcattgtctctgtcacatggggtggtcacagcctccctgggaggtaggaaggcatctgcagcatgtcaaaaccagcttatctcgggtgccccaatacacctgacatgttacagctgcaccacgggaaggtggaagctgctgacaagatgtatttgcctttccattcgtgagaatgtatgcattctctctctctctgtctctttttttctctctttttctctctcattcaaagacacacacacacacacacacacacacacacacacacacaccccagtctcaaacaaacatcaaatagacatgtggtcacttcagtgaccttcttgtcctaggtaggagaatacaaaacacaaggcctggaaatgactcgtctggtttacatgacatgtccctgctgagatcaggaaccgggaaactgcctggtatggggaaaagaatgctggacttccagttggcctggattccgtaccacagcctgaccctgatctgccgggtgactttaggtgtcactctcctcatttctaaaatggatgtcgctttcctaattcacaaattgggtgggaagtaggtttgttcatttgttcaaggcattcatttattcatccattcacttccaactatgtcgtaagcaccttcagtgtgctaaacacagctagatcatttgatttgaaactctaaagatttaagatgtgatccttcctacgcctgtttaagagttagtacttaaatgataggtcttttgactcaaggatgccttgtgctaggatttccctctaggtaaaaaatttatctttctcccatgcataaagtgggccttggcaggccaggtgcgatggctaatgcctgtaatcccagctctttggcaggctgaggtgggaggatcacttgagtccaggagtttgagtccagcctggtcaacatggtgagaccctatctctacaaacaaacaaacaaacaaaaaaattagccaggcatggtggtgaatgtctgtggtctcagctacatggtaggctgaggcaggaggcttgcttgaacccaggacgcagaggctgcagtgagccgtgtttgcaccactgcactccagcctaggtgacagagcaagacactgtctcagaacaaacaaacaaagtgggccttggcaagaatatattgccagctctgtgtgccaatttattcatccagtcttccatctatccattctgtccatccatccacccacccacccattcagccacccatccatccattcatccacccatccatccattcagccacccatccatccattcatccacccatccatccattcatccatctatccatccattcatccatccatccatccatccatccatccatccatccatccatttttccacatgaacccttgcatccctccatgcaatcatccatctattcaatccatccatttatccatccacgtatttattaatcacttctatgtgcctggctcaactctgtccactgactccaacctccaagaaggccctatgcccatagtcagcttgagtttgaggcagaggtgatggaaagctcagagtctaggtagcaataatttccgattctcagaatccaggaactctctgaaatgccttcaggcactttgagagtaagcggagccggagacagatccgttcaggctgcacacacctcccctgtttagatgaagcccttcctcttggttctgctctagcctctccctccgtgagaacacctgaagccccggccctggccctgtgtcaactaaaaagaatcctacatgaatgggtaaacaaactgtggcatatccatgcaacaaaatagtatacagctgtgaaaagtaatgaggcactgacacgtgcctcaccatggccgaaccttgcaaacactatgctaagtgaaaaaaaccagacacaaaagaccacgcattgcatgattccatttgtcaaaacaggcaaatccatagagacagaaaggagattagtggcggccgggggctgaggggaggaaagaatgagggatgattgctaaaggatacaggattcttttggagatgatgaaatgttctggaattagtagtgatggttgcacaacgttgcgaatagaaatcactggattgtatactttaaaagggtgaactgtatggaatataaattattt

SEQ ID NO: 3219 - DNA, 3922 bp, Homo sapiens
gctgcgcactggtcccgcccggccgggccggggaagagggcgcggcaggaacaggaagagcccggcgcaatcccaggtcccgacccgccccctgcgagcgcccgaggccggcgcgggaggaccctgcgcgctggacttcaccctggttccaggcacctccttcggtctccagggccggcaatgcgctggggagttgaaaagcgctgccttcctccaggctttcctggaaagaaacgcttcatggcagtcttgaagacagcagcctgcattctcagtctgggaacctactcctttagtccctgcttccagaggaagaaattctgaaagaattgcgtttgcctgttttgagcctgcgggttacctaaaggactgacacaagacattggtctttgctttccctaacttggaacagggcagagaggtgtctcttcagagggtattgctcaaaaaacttgtaaggcaaataatctgcagccacctggggcaaaagatttcagttgaagcaaacagacacaccaacagcctgagaggaaaagctgggagaaagtttcttttggaaatttgggcattcaacaatgtccacttatactaaggttaggaatttagaaagtcatgcatatatgcccagggcaggaagcatgctcagaaaagatctgaaaagaccctttagctgaactttcggctcagcacaagcaggaaatgaggctacagtagagttgtaaacagcagggctaagcaaccacagtgtcccccaacacagccattctgcaaagactgggagaaggtggttgtcctcctttctgtctactcttttttgggggatggtggagggaagctctaggtattcaaaaaagtctgtcaaaacactagtggtggctcagcctataatcccagtgactcaggtgggaggatcacttgagcaaaggagttcaaggctacagtgagttatgatgcccctgcactgtagcctgagtgacagagtgagaccccatctctaaaaaacaaaaaacaaagtgtcgggcgtggtagcttacgcctataatcccagcactttgagaggctgaggccagtggatcacctgaggtcaggagttcaagaccagcctggccaacatggcgaaaccccatctctactaaaaatacaaaaattagccaggcatagtggcacacaccactagtcccagctactcaggaggctgacgcaggagaattgcttgaacccgagaggtggaggttgcagtgagctgagatcgcgccactgcatcctggcctgggtgacagagcaagactccatctcaaaaaaacaaaaaacaaacaaacaaagcatcagctgaacacaggctaagaaagagactttagagaacaaacacaacaaagaacacagaatttagaaagagtttagaacactcactaaacaactacaactcatagcaaacaacaaaaactcagaaggaagggtctgatttccggagtcacattataatattcaaaacctccagttttcaacaaaatgttacaaagcatgtgaagaaataaaaacagtatggtacatacacaggagaaattaacacaaagagtctgagaagaagaacagacactggacttactagacaaagattttaaatcaactgtcttaaatgtgttcagtgagctaatggaaatgatggacaaagaacaagaagcctgggtaacatagcaagaccccctttctaaaaggaataaaaataaattagccaggcatggtggcacttctcccaagctacttgggaggctgaggtgggagaattacttgaccctgcaaggtcaaggctgcagtgagccatgattacaccactgctctccagcctgggcaatagagcaagaccctgtctcaaaaaaaaaaaaaaaaaaaaggaaaagaaaaaggaaaaagaatgacaagaaaccaggagaacaatgtctcaacaaacagaaaaccaacaaagagacagaaattataaaaaagaatcaaatagatatcctggagctgaaacatacaataactaaaacaaacaaaaaaaaaacttcactagaggatttcagtggcagatttgaactgatagaacaatcagccaacttgaagataggtcagttgaatttatccagtctgaagaacagaaagaaaaaagaaggaagggaaatcaacagagtctaagatgcctatggaacaccatcaagcataccaacatacatataactggagtcatagaggcaagagaggaaagggaaagaatatttgaagaaataatgacagaaaacttcccaaatttgatatgacacaaatctaaacatccaagaagctcaatacacttcaagaaaaataaagggatccacaccaagacattttgtaatcaaactgtcaaatgacaaaaagaatcttgaaagcagcaagaaagtagtgacttggataagcaccatggctcaagcctataatcccaacactttgggaggccaaggcaggaggatcacttgaatccaggagtttgagaccagcctgggaaacgtaaggagacctcatgtctacaaataatttaaaaattatccaagtgtgggggtacacgcctgtggtcccagctactcaggaggctgaggaaggaggatcagctgagcctgggaggtcaaggctgcaatgagccatgatcgcgccactggacttcagcctggggacaaaacaagaccaggcctcaaaaggaaaagaaagtggttcatcatgtaaaaggggtcctcgataagattaacagctgattgggaggccagggtgggcagatcacaatgtcaggagctcgagaccggcctgaccaacatggcgaaaccctgcctctactaaaactacaaaaattaggccgggcacgtggctcaagcctgtaatcccagcactttgggaagccgaggcgggcagatcacctgaggtcaagagttcgagaccagcctcaacatggagaaaccctgtctctactaaaaatacaaaattagccgggcatggtggtgcatgcctgtaatcccagctactcgggaggctgaggcaggagaattacttgaacctgggaggcagaggttgcggtgagccaagatcgcaccattgcactccagcctgggcaacaagagcgaagctccgtctcaaaaaaaaaaaaaaaaaaaaattagccaggtgtagtggcgcacacttgtaatcccagctactcaggaggctgaggcaggagaatcgcttgaacctgggagatggagtttgcagtaagccaagattgcgcccctgcactccagcctggcagacagtgtgagatgccatctccaaaaaaaaaaaaatttttaaattagcaaggtgcagtggtgtgtgcctatagtcccagctactcaggaggctgaggcaggaggatcacttgagcccaggagttcaaggctatagtgagctatgatcacaccactgcactccagcctgggcaacagagcaagaccctatctcttaaatttcagcactttgggaggctgaggtgggcaggtcatgaggtcaagagatcaagaccaacctggccaacatggtgaaaccctgactctactaaaaatacaaaaattagctgggcatggtggcacgcgcctatagtcccagctactcaggaggctgaggcaggagaatcacttgaacccagaaggcggaggttgcagtgagccgagttcgcaccactgcactccagcctggcaacggagctagactccatctccaaaaaaaagaaagaaagaaacaaaagaaaagaagaaagaactgtgaaaggacagaaaaacttataacttttagaaatatatatacacctaagaacagagcctcctgcaaaaggtgacagaattaaaaggagaaatagttcaaaaacagctggagtcttcgataccctacttcctttacttctttcttt

SEQ ID NO: 3220 - DNA, 434 bp, Homo sapiens
gtaggcgagccaccttgggcctatgtccgcatggtctccaggtcaaaattcacatcctactgattgaaggccttggtcttcagctgttgggttggcgtggtgtcaggccaggaggctgcagactatgactgcctgttgcagtgttgggaaacacacatgttaggaaacacatgtgcatgagggagacacacacacacacacacacacagccactcagcaatgtgtgtgtgcgcggtcggtctggcgccacacacagctccaagctgtttgcagagtgccactggtaaggtacattcatggaaacagaggtcactcatggaggccaacagaagcaaggcgtgcaagttgccacgcatgaaagaatggcactgaagtagtgaccagtggacctgggcctgtttctcaagcgtacatttgatttctttatacttctc

SEQ ID NO: 3221 - DNA, 1448 bp, Homo sapiens
gtgtgagccaccgcgcccagcccaaattgtataatcttgaattctcacaaattcgagatcttcccacgcacctctgtgtgtgtgtttgttttggtgtcccttaacactttccctgcttcatcacactgcccagagcttcccactgggaacatactctcacctccttaattcccatttcctttttcttacccaaacaggaaggagtagccactattcatgccattgtcaaaacctcatggcaacaaaacttccagggctggaattgcaaagatgattacaaaggggagctccacaatcaggtgttccaagataatgaatacttccatagcaacaaaagtctgacaataaacggttaccttgattttcacattttcaaagaaaaatccctcaatggcaactagaccagaagtctcaacactgaatatgcaataatggctacaaggtgaacagtttttctattccattttcttagcaacatcattgattgattttcttggaaaggaagttagattggattagatgatctttttgtttcagtcatgtagcttgttattagcaattaatatatgcagtagcttttgaaacaacataagtaataagtgacttcagtagaaattcattatattctaacacaaatgatttataaatgcaattttattttaaaatttctatcctttctgtctccctgattataattgtcaaagtattctgatagtagaaagtgtgtatgactgaaaaaatggtataaaatatttcagatatagtatatattctataggttgaattcaaaagactgctgtcactgtacattttttccctaacaaatcatcttttttctatgcataacctatggtgaggcaacattctttacattgtgttaaacaagaaaatactttgtaatgaattaaagttaaggaaagactacatctatcagccacaaggaacttgagttctggcaattttgagggtttaaggctcacagttttagcagctatgtctgcataaggacttgattggatcaaaataaagaacacaaacatgaacaaggggctccctgaaaattcagagcttcaatgagttcagcacaagtcctaaaaggacatctccctaaacattgacattaaacgtttttgcactggcttgactgggtataactttaaaatgaaatactaagtgaaatacctgtataatgaaaactataaaacactgacaaaagaaattgaaggggacaccaaaaaatggaaaaaattccatgtttatgaattagaagaatcaatattattaaaatgttcatattacccaaaacaatttagagattcaatgcaccctctatcaaaataccaacgacatttgtatcaatcacagtcctctagagggacagaatatgatatatatgtacatatatcctattatatatgtgtgtctatatcccattatatgtatactgt

SEQ ID NO: 3222 - DNA, 1421 bp, Homo sapiens
ttttttttggggtttataatgtggttcagatttctgtagaaattctggctgtatctacattgccttaaagtaatgggatatttttttttttctttttctttttttcttcagctggagttccactgttgtcgcccatgctggagtgcaacggtgtgatctcggctcactgtaacccctgcttcccaagttcaagtgattctcctagctcagcctcctgagtagctgggattacaagcacctgccacaatgcctgggtaatttttgaatttttagtagagatgggtcttaccatgttggccaggctggtctcgaactcctgacctcatgatctgcctgcctcagcctttcaaagtgttgggattacagtcatgagccaccgttcccagcctgtcttttctttccaaagccacccttggtgattaaatgttaaatatgtactagtggatattactttgctgaatattgcctagtgaatattaagtatttattctcacttacagacatgaacttgtgaattcaacaagtgaagatttacaacttgataaaccagctgcaggagtaaaggaagaatggtatgccagaatcactaaatgaagaaagatggtggatcagcttttctgcaaaaaaatttgctgaggccttggggagcgctgaggccttggggagcactgaagccaaggctctactgtaccaaaaatttgaaggccatgcgaatgatctgtatgtggaaggactaccagaaaacattcctttcagaagtccctcgtggtatggaatcgcaaggctggaaaacatcattcaagtgggcaatcgaattaaatttcttattaaaagtaactccagtcaaactccattgtctccaagtcgactttcgtcctcacccacaactcctccacacaagccctgaacatgtgtccatgtaagtgacatcctttatgtctttatttttgtatttgatttgatttgatttgattttgagtgcagtggcacaatcttggcttactgcaacccccaactcccgggttccagcatttctctgcctcagcctcctgagtagctgggattacaggcacccaccaccacacctggctaatttttgtatttttagtagagacgggggtttcaccatgttggccaggctggtcttgaactcttgacctcgtgatccacccgcctcagcctcccaaagtgctgggattacaggcgtgagccaccgtgcccggcccatgatttactatttataagaacatgggcttactacttgtgtaatacttatccctgtattttaggtgggagttgctgaggtttggtgactacatctggcctctcagggaaatggccaagttgttcacatctcacctgtataatgtgaagttgtttgtcagcttcattggttactactgtgaaatgagttataaagg

SEQ ID NO: 3223 - DNA, 3184 bp, Homo sapiens
agaagccagactgagaaagaaaagcataaaggacacgcaacagcatgatgcctgagcaaggaatgtggatggagaagggaatattggacaaggtcaggaccgccacttctagagaaatgtgataccgggacaagatatgactaaaaatgtctgcagagcagcagagagtgcctacctcaagttaagtaacatgaatttgcggtgaattcagtgcatttcataatactagagttattattaaaaagacactgtttattatttaattggttttgaattgtttcttatgaattaactttgtctctccaattataactttcttaggcaagaggacatttctgacataatgtttatatcttccattgcacttattacagtgctagcgatataacacatacccagcagaaggttgatagcatataaacaactacattttcaacttggcctttatgatgtccctgcttctggattttgtttagttcttctgctattttccaggtagaagtatgatagttgaactttattgtgctctagaaaaagcaataaacccttctgcaaacttcataagatagcacagtaaaaggaactctacaccaagaggacattttcccttcaaaataacaaagcagaacacaaagtaaatcaaagcatataaacggagaaaggaattccgttgcctttgaaattgaactccagaaataatttacttaaaaagagttcctcagatatagcttgaagtctaaagacaatcattgatcatcaactggtattctcttactccatcagcactccagatacaaagcaagagaaaacccagagtaaaaaatttaaatggacaatatttcatctgcaacctggaaagtcttctatgcttgctgttgtattgactttcctacttatctcagaaaattgtgcatttaatcatctctctctattttctttgactcttttccagtgagagagtataagattgtttacctaaagacctcgaagtctagcaagataggaagcaagttgttacttaagcaggttgggggggcattatgggcacaatgaaaattaatcattggttctctttgcctatcaaaatacatcgttcacataggacccctttccccaataaatttagatcatgcctactctagaaaaggaatcacagcattgtcacttcttgatgttgtgaagtaatttgtaatgcgcagaaatgatttgaatacatgtcccaacagagctttgtgaaggaaactcaaagctattctgacataatagcaaatgatagcagagaagggactgaagcactgcagcaaacccaaaattgttccaatattcagctgctagaacaaaaaagaaaagcctcactactgaacctttttcatttcgtatagctgctcaaaatttagaaaactcatagaccataatccattaaaacagcatctattacatcaagttctaattgctaaacttgctggtaaatccttggggtaaagagattggaactcttccattttcaataaagattatttgtaaaactaaaaaaaaatccatgagacaatctgatagatgtctcattattcctgatctgtgttcttttttatttcttagccctacctctacaaccgattaaaatgcttagcctaaatactttcaccatttcaaagaaaccactacaaaaagtgctattttttggccgggcgtggtggctcacgcctgtaatcccagcactttgggaggccaggcgggcggatcacgagatcaggagatcgagaccatcctagctaacacggtgaaaccctgtttctactaaaaaaatacaaaaacataattagccgggcgtggtggcaggtgcctgtagtcccagctactcgggaggctgaggcaggagaatggcgtgaacccggaaggcggagcctgcagtgagccgagcacgccactgcactccagcctgggcgacagagcgagactgtctcaaaaaaaaaaaaaaaaaaaaaaatgctgtttttttcctggattttatgaggataaaatttagataatcttttaaaaatatgtacaatataccaaactatttaaatagacattagcattttctgttaaagtactgacatagtatttgcaactattttttaaatcatttttctactcttgatcgtttatagtcagaatttcagtcaagtttagcactatccaaaaaaatcagacaggatgtgttgcttcacaaataagaagctacatgtaagtcctgaagcacaaggtttaaggaaaggatttcagcaatgacttattcagcagatactcatcatatttcctcttgtgagttctgttatatagtccatattcctatgcttagagcagggattattctgcctcattggccttaaactacatcagccctataacctctacttccccacaggtttcagtgatctcccaattctgtcgcagaaagcttttccaacaaagtacacatttatattacaaccacaccccatatgtcctccatgaactcttattaattctccaatacacatgccattttattgctctgtgaagtcttccatgttttttccacgcatgctttctctgctggcctctgtgtatacctctattatatcatatagttctgtgcttatcacgaatttttgataatgcatttctggcaataaaggagaataaaacagaccctccaaagagtttggatgaattagagcaaggtggcttaccatcagcataaaatttcttccttaaagattagtttaattttattttagatataggggtacatgtgcaggtttgttatatggaaatattgcatgatgctgaggtttggaatatagatcccaccaccaggtagtgagatgctaccaggtagtgatacagatgctcccaccaagtagtgagcacagtacgggttaagtagtttttcaacccatgtttccctccgccattcctcctctactagtctgcagtgtctattgttcccatgtttatatgcatgtgtgttcaatgtttagttcccacttataagtgagaacgtgtagtatttgcctttctgttcctgccttaattcacttaggaaaatgacctccaactgcatccatgttgctgcaaaggacatgatttcttgaaatcatatgttttatccggtaaaaataccttaaaatatttcatgctatgccattatgtgtcc

SEQ ID NO: 3224 - DNA, 4364 bp, Homo sapiens
caactcctccagggtggggcagtgcagagggggccctggccagccctagtctggggcatctgatggcaggaccaaccctccctcacaggacccagcccttgtcagggcccagcccacactggggttggtgcccgtctatccctgacaaggacactcacagtgacctccttcggacatgtttttcttcttgcctgtggatcaattcctcctggctcagacccctccaggactctggcactgatctctcttggtctcggatttgaggaaataaaaatagaagaggaaaaacacagaactctccaaagctttggagtggctgcagccatctggatggaggcagcatgcgcctgggctggaagagccacggtcccttgactgagtctcggtgcttctccccgtccctctcagacacggttctcatggtggacgagatggggccggatcttaggcccgggattctgcagaatgcaaggctcagagcttgcctagctctgagtggcttggagactggtgtgaggactgagggtgtccacagatcaccaacccacaccggcagcctgagttggaagacagacgtctcggaagagctggcttattcgggaagctccgaggaaccttgccttgtccagccttttgggcacccccactctttagctcacagtcgctccctccatcttcacagccagcactgaagcattccccactcgctctcattcagacctctgctcccaacagtcttgtcatctctctctctgaccgtctcacggaaaccctgtgatgacatggggctcacccacatatttcaggatagtctgctcatctcaagatcctgaactccatcgcacctgcaaagtcttttgtgcaaggtgtgatagaatcaaaaataaatatttggtcctgccacagagtttccaaaacccttggaatcccctcagcgggctgatgggagcatcgattgtcattcagaccaatcctctcctgaccatacctgagtttatgctaattaggtaacccttgaatggccaatggaatcaaccctccagagcgaaactctgtctcgaaaaaaaaaaaaaagaaagaaagaaagaaaaaagaaatgctgattagagggttagaactttcagccccacctcctgaccctggggaggggagagaggctgaaggttgatctaatcaccaatggcgaaagatttaatcagtcatgcatacccctccctgaaagaaggggttcagagagcttccaggttggtgaatgcgggttgattctgggaccaggaatgctgtttctgcagacagctgcagggctattccctaggcttcttgaggtctttgtccaaagtcacctttctcagagtcttctgacccctgttgacccctgagtctcctcctgaccatctcttttcccctgtcacttgctttctctccttaatactgattgtcacccaacgatggaatgccttacagaagactagagagcagcaactttgtctattttggtcactgtgtgtccccagttcccagcacagtgtttggcacacagcagagcttatttgacatgttttgatgaataaatgtcattgttgttaccaacaggctggaaatcaggacacgtgggctctgcccctcacagttgagtgaccctggggagggccttaaccctggtcttctgggcctcccactttcaggtcaaggttacagtcgggggcctgtgggtgggcttcatctgattggcccctttggtagtgctgggccgcatcttcgggtcatcagtgaaaagcgttctcaggtgtgcccaggagcacgtgcccccacagagcagtgaccttacctgctgaccctcatcccaaaccctgtagctgtttcctctgctctttttttcgttctggaaaaggaagtggctttaggaaggacattacgtgtgatgaatctgaccttggatgcatgtttgctcaaactcacatcattgtttaatgccacaggcaagtcactgagtaacagactaaataattcccaagaaaagtttatatatgtgtgtgtgtgtgtgcgtgcatgtgtgtgtgttggcagggggtatctgtgggggcgaaggtggagactgatggtgggtggtgactttggccacaatttgctccaaggtccacatccttgtacttgaccctcggtggtgcatatctaacacaattaaattatagaaatgctgggccaggtgtggtggctcatgcctataatcccagcactttgggaggccgaggtgggctgatcacctgaggttgggagctggagaccagcctgaccaacatggagaacccccatctctactaaaactacaaaattagccgggcatggtggcacatgcctgtaatgccagctactcaggaggcaggggcagcagaatcacttgaacccgggaggcagaagggttgcggtgagccaagattgcaccgttgcactccagcctgggcaacaagagcgaaactctgtctcgaaagaaaaaaaaagaaagaaagaaaaaagaaatgctgagtaaaaacggtttcgaatgctaaagccagcagagaaattacatatttgagctctgaccctttgtaacagaatccagatctgtggtatctctattttgggaggttttagcataagccatcttacacattccctctcaccaagagttaggcagcaatgtctttgtccttccaccttgcaaggtcactctgacctgtgggtgggtcacccagaggtgctgtgagtgggacagaaatagctgctctgagcaaatgcctttcccagcagtctctggggaggatgatactccagcttggcagagcccctccagccctgcaaacaagtgctggtctctgtttgacccttatttagcgtgtcgatgaaggaaggaatgacagatgacccaggccccaatcctggcctgtcctttgagtggtccctaaaataataccattagtggggccaggcacagcttcttatctgtggagtgggtgcactgataacactgagcaggtcctcacggaagccctgggtgaggaggggtagcagctgcgggccttggacatgttgcgaaggtcttcgcctcctggctggcctgctgatgttccaaggggtataaatagtccgacgggctccacgtctgattgtgcaggcatggcggcagcggcagagcctggcacacctggtatgtgacacccaaccaaagccacggtgcacaggcacctgctgctgcctctgccgccatgtcctcagccagagtgggccctgtgaactcctcctcccagccttgcccagccgtgacctccttgtccctgcttcagggacagggatattgaagggtgctcaccttcaatatcgtgccttaagcatttctgtggctgcccacagttcatcatcagaatgcttcttttgttcacatttattattcttggtcctagatttggaaataaagaacggcacacaggaaaaggtaaaaaaaaaaaaattgtccttaaatctgaccttctccttccactggatattagctatacttatttttagactttttttctatccatacttacattgttttgctgttgttttaatacaaaagggattatactcaatttttgtagccttctctcttcacttactgaataacaaatgtcatcctgggccccagacccccctgcagccccgtctttgatggctgcctggaccacctgcaggagaagcccctcagaagatgggtccctggaacctttgcgcaggtttgctgaacctcaggagttcactcagcacatcgttcgctctcagctgccccagcaggagctgcgcagaaccgccttggaggcgtgctcagaggacacttcctcacttttataatgaatcgtgagcactctctcctcgctttggccggcagagcctgcctttctggccacgtggacgtcttcatgcagggtcctgctggccccttgacatcaacaggcatgaagctgcagccatcctctcccctccccaagttttgggcaccaccatctcctagtctcttgagactggcccctggcttctcccgttaccccagcctcagtcccatccaatctgctccccattgagaagtccaagtggaccctcttctccggcctcactgcccccagcccactccttgggctccatcccagcctcttccttggcggtcccccagctactctccagtcctacgtgcagctgcatcttccagatccacctggcacggcatctccttctgcctcaatgcctgggattcaggaccttgatcacagctgggttttgtatagaaataaataaataaaactgaaagaaaaaaacacgaaatgttaatattgtttatatgaggttggtgggat

SEQ ID NO: 3225 - DNA, 8351 bp, Homo sapiens
cccccaccctgcccctgcgtcgcggcgcgtcgcgctgctgctcccgccccagccggggccgaagatggggcggcggctgcggttttccacacgacttccttggatctcggggcacacgcgccgatagttcggacgcgagtccgggctggttttgctccgttttactgcgtttgattactaatttaaaagctttgcgttccccgtcgccccggcccgcttttctcctgcattctcccctcggcccccgtccccgccctgcgatcgctggagggggcgtcggggctcgcgcgccagaacccggctcctccgaagccccctccgggccccaccgcccccctcgcgcctcccggcccccgcctcctccccttcgcccccacccaacggctgctgcttcgggcttcgcggctcaaaaacaacagcggaggcgccgccagctccgcgctccgccactgcccaggccggcgggcggcactcggacccgccgccctcggtccctcgcgaggccacggaggccaacacgcctcgcacggggggacagcgcgggggcagccgtccaaacaccaggcgtcctcggctggtcgtcccagggcgcccgcacctctccgcccgcgctctcctgccgccgcgcccccaagcccccaaactccgaggcgctgcggcggaggggccgggctgagcgcaggcagggtggcccgggcccaggagcctgacggcctgagtgcggatttctcatctgagtatctgggaatcgagaatgaattggaaggaaaccgaggcgctgccctggccaggttgctgccccgcacccttccggagcaccgaagtcctgcccggcaacgggacttggagctgccgcagagtcagcctgagcccgaggcaggggtcgcgcccgcgatgcggggtctctgcgccgccccgcgaggctcctggccttgccctccctgccctttgttgtgtaataagacctgtggcggctccactgagacccacacgtgcaactccgcgcctccgcgttaaaggaggtgaaacgcagcagccctgagaaaccccgagaccccggtgtcctagcagaggcgccccggatggggaggggcgcggggccggcgccaccccagaggaaaagcccagcggagccgggttgggcaggagctggcggcggcggtgcgctgggccttctgccttggatcctccgcggtcggcaccgcttccctgctcagattcgaacccagattcggctcccaaggctcccacggctccagggtgcccagtcttgcagccagctcgccgcccgagccccggatggaggaagcgctcactggccgctacctctgctgtttctggcaccagatgggcagcttccggggaccggcttgcacgatgccgtggccaccccagtggagaccctctgcccggctttgtgtcctggcgtccccaccagggtgcccagctctcctgcgcagatgtcgggagtatctggatgccccatgggcacttcgagggcccaatccggagttttttgttttgttttgttttaagagattgagactgtgaacctgaactcccttgatctcctcccgttgggcccaggagggagccgaatccaggcccaaccgggctcactgagaaggtgcaggaagcccccaacgactcctactcgtgtgcggcccatactgggccaggacgctgcagtggccgagccgctgggtgtctgcaacggggagctcccccgccgctgggggcaataaacggaatcggtttcacacgctttccctcttgatctaagaacctttaaaaatccgccaacgaatgctgttgcctggatgcgctgcctatgaccttcagccgtgtgttcacgcgcgcccgcagccgtggagtggcggtccctcctgccgcccgcaaccccggggccgccggtctgcgcacaccgggagcaacttcgttacccacagcgcccgcgtcctgcggctcgcgcggaactgcgcgcgggaaggtggcagagcgacgctccagaacgctgcttgcgtagacgctgccgctgccttcagatcccaattcggccgcgcgcgggcggggccctggcagcaacgaaaatggcgagcctcgtagccttccgggcccggcggccacattccgggagtcgccaggtgggagcccgccttccgtgtccccaaacgcccagagcccgggacacgggccggcggccgggtcaccaagccagttcccggaatcggctcgcgccggaatccagactcggcttgcaaagcccgctcctgccgtctctccgcagcgcgccctgccccccactgccggccctcttagcttcaaaaccaaattttgcctttcatcctgagagattaataccccgcaggtgaaaccgtggagacggagctgcggtgggtttcttttccacgcctcagtttcctcgtctgtgaaatgggaccaggcgcgcctgtgcttctccgggagtttattgcagggctggctggagagaatggctgggtggaagctgccaggaggaggcccaaggccgcccaccccgtgggcctcgtttgctgagcgggggtcagaggcgtgcgggacagggcgcgccccacggcggctctggaggcggcccggcccgtccctgtctcctcccctcgctccccctcccccggccttcccggaactctcctcgcccgctgggtggaggaggggcgagggccgactccgccgcccctggggtctccctcctcccacccccaccgcagagtctggcccgccctgggctttcctctcaggtccctttgggtctccagaagcccggaggtttcgcgcagactcgaacctgagatgacaccacccagcaccccaaatcctgcagagtgtggaggggatctggggagaaggcaggggctgcccgggcgctctggctgctgggggtgggggacagggcctgccggggaagcgggtcgggggaggactggagacccaggctcccctaggtacaacgaacctcgcgggagggaatacgccatccccgtacccacttccgaggacgtaggtcttttggcaccggcggcagccgcgttcccacacatctgggcggggccccgcagcatggcctggggagctgaggcttcgggatccggcacaaactaccattctaggtgtagacggaggaggtggggtgtgggaagcagggggccatggtctgagcagaccttctcacctctgggcctcccacctcctggggcaggacttacggggaaggacccgaggggagtggggtgtccatagggacacccaagggtctatccctgcgagctttgctttctactaaaccaataatcgcagtggtggtggcagtcgagacacggctcaaagagccggcaagaatagagcagagaccaggatcgccccaggcagggaaaaaatgaccagttctgtagagtgacccgaaggtgatggaatcactcgggcgtcctcctgggaaagagctgcctgctcccccgccgccgccagtacaccggcgcccatgccccgggggctggagagagcagccaggcacagcccctccagcttcctgggagtccaatttcccaaggtagaacggtggcggcagagcctggccctgtggtggggcagctgcaccccgatgagtggcttgcagttcctggagccctgcaggttgttggagaggcagggagcccttctccctcctgcctgccctcttgcacttcctctcccagaacccagcactactcccagaggctctgagctggagccctagaaggaggcgctgcaaggctccgtgctcctggagcttcgagtctatggtatgagttaaacagaagggtatctcctccatcagatctacaggagggtgtctgctccatcagacctggagcttccaaggcattttacccgaagctccagcacctggcccaaggctgggctgtgctgtgtcctcagtgaaagaatggatgagtcacagctgaatgactgaagagctgaaccaggtccagaaagactcagccactggagtctgtatttcctgagtcgcctctcactgctggagctgtttatcatcgctccaactttcactaaaaaggaaaaactatcacttaaacaaagccattgaaaccccagcatcatgtgtggattttttaacataaataaatcatacaaactaagatttatgttcttggaatgatgtcattcattgaaggctgccttcccaatcaaagccgtgtttagtgatttttctttagtgggtgtgctttttgctaaataggaaaaacccgttcggtcatccttgctgctgtcttttctcggtttggcccagaacatcagaaaggtttctccctgggccagtccacagagccaaatggtgaaaatggttttaactccacagactgcttttaaagcctttgctttggaaccgttaagtctgagatcaaaagactgttaaaccttccctaagaatgtgtgcaggcctcagcagaagtttatggtcctcccaggtctcccagagcctagaatgaatctcgctgcagagtaacgcatctgcagaagcttcaccaaattgaaatgagtgaggagcattaaaatcagcacacgtggataaataacaggtggcatatccatgcaatggaatactatgtcgccatgaaaaggaatgaagagctgacgcttgttacagcatgaatgaacctggaaaacatgacgctccgtgaaagaagtcagtcataaaaggtcacgctttgtgtgattccatttatacgagatgtccaggatgggccaatccatagagactgaagacatattagtggttgcctggctgtagaagtagaggcagtagtactctgggccaatgaaggccctgggaacagatgggccacaccagagtccagcttcagccctccaggcattgaaaggagaccattagctggaagccagtgggaagtcgggctgactaatagggacaggtgtccaggaggctgcagtgtgaggctttcatttgttcaagcaacacacattcactgcactcttaccgtgtgccagggacagccataggccctgagactacagcagtgatggagacagacgctgctcccatcaaggtcatgttttgatggggaaagcagcaataagccaaatacatatgggtctggggtgccaggctagacgattctagtgcaatggacatgaaagaggagagaggtgaaggcacagtcttcaatcggttgttcaagaaaggcctcactgaagtggtgacatttgggcagagacgtcagggagggatgagggagccacccaagtgtctgggagaacagcactggggcagatggaacagccagtgcaaaggccctgaggctccagtgaccagtgtggctgctgcagaaggacggggaggggaggaggggaaaaccgtgtagagtggcagtgggaggacagattaaggctgcaggtggaattaaagttgctctttcagctgactttaaagtagggagacgattccagattatctgggtggccttaatgtcatcacgaggatccttaaaagtggaagagggaggcaggagagtcaggattaggatgaagtggagatatgtgagaatatgaggaagattcccctggctgtgctggctctgaagacagaggaagggcccacgaaccaagttacgtgaatacggacagactctagaagctaaaaaaggcaaggaaatggattctagagcctccagcaaggaaggcagccctatgcatgccttgactttaggacactgagatccatttcggacttctgacccacaaaaccaaaatctagtaagtgtgtgctatttgaagctgctaaatttgtagtaatttgttacagcagccaccagaaattaatatggggaggaaatagggatttcatctgtccatagtaaagacatgccgggggtgataagaatctgagcccatctcacctagatgagaacgagagagtaatgaccacagaatagtggtgatggccatcctcacatctggctccttagccacccatgccagtatggactgactgccttctacgtcttgtccatggccattctctagggaaattcccttgcatctcctgctacctttacagactacatattttgttggattactttctcattttcatgaagcatatcttctagtaacttctgataaaagatgcataggagataaatattttaggacttccacagtaccagaatgatggatgaactgggtatagaattccagattggagatgatttttttgttcagaattttagagaatattgccccattgtcttcttgctaccaggcagctattgagaagtctaggaagattctgtttcctcggactttgtgtgcagtgtgatttttcctttttggaattttatagaatcttctttgtcccaagtggtcccatattccacaatgatgtgccctagaatgtgtctgtttttatccactgtgagttctttccaactgagaacttgtgtccattagctctgggaaattttcttgaaatactttcttagtgatttctactctctgttttgtttcttcttcatttttgaaacttgatatttatatgagctttcttctgcacatataatctgtgtgtccaccaaatggctttgctctgtttgtttcaatctgtctttcctgaggcatctgctgattcttggctttctgcccatgatgaggagctgactggaagttctgacagtaagagaggaggggttcattgcccttgagacccatgaatgggagtgatccttgatccttggatgtcagtatctttaggaactgacctgattcccagagaagttacccagggagcaagggagggtctggctgccagtcttcttggagtcaacttggagttgaaggcaggggtctttgcagtcagctgcctgaattctgggaaataaacctctggacttttgctggtgtgggggaggggtggtcgctcagggaggataaggaggggataggaatccccctttactaagccatcctgatcgtagccgctcttgcaccccaagtcctagaggtaccctttttttttgacggagtttcactcttattgcccaggctggagtgcaatggtgcgatcttgactcactgcagcctctgcctcctgggttcaaaaattcttctgcctcagcctctagagtagatgcgattacgggtgcccaccaccaggcctggctaattttttttgtatttttagtagagacagggtttcaccatgttggtcaggctggtcttgaactcctgacctcaggtgatccgcccaccttggcctcccaaaatgctgggattataggcgtgagccaccacgcctggcccctagaggtaatcttatactcagtcttgagtgttaggattccccttggttataaatctggtaaaatctcaccttcctgctctctattcaggattttctcttgtctctgatccaattgccacaggtccatcagcaattcagctttcagaagggaggcccacccttatgggtagatgccttttgaaatctctttattgtggttgaagtggggcttacagaggggacgctattgaatgggtgtgtgtttagtttgccatcttaacccgaggcttttgtggctattttagaaagactgtgtccattcttaggtctaggcccgataccacacacagtgtccacacacaggggctctgaccccacagggttctttgggtcctgatcaatgatctttcaagagcctcccccttgacctgcttctggccacagaaacagctgataaatgaaatttgttagtttcctacaatggagtgttgcatcagcagtgaacatagtgacaagagtgcatgcttatcaccacgctgacatgtccctgagacatgggggcgacctttaagaatgtcagctgaaatattaacagcggttttccctgggtgattagatctgataatattaaaacttttttctctgttatgtttctctgcatttaatttttctccactgactgtatattagtggtggaagtgttacaatgtttaaaaataagaacatcaaaaaattagcccagggtggtggtggcatgttcctgtggtcccagctactcaggaggctgaggcaggaggatctcctgagcgcaggaggtagaggttgcagtgagccaagatctcaccactgcaccccagcctgggtgacagagtgagatcctgtctcaaaaaataaaaataaaaatgagaagaaaatcctatctgtccttcaataaccagctcagccactgctacctcccgggagtctcccgtattcccactgttgggaatgcttcctgcaccacattaaataaactgca

SEQ ID NO: 3226 - DNA, 301 bp, Homo sapiens
agaaattctaaagttggaaaaagttgagagagaagggaggagtgacaactgcaggctgctggagaaacagcaaggttctcagaatttttcttctaccttgatcaaatgtcacagaaggtacttcctggtatacacacaggagttgcctgcagaaaacgtcctgcagaatgttccaggaatttgatctccatgtactgttctgagaggctagcctgcggagaatgaaagtaaggagcaagcaagtgatcattactcaccacctcaatccacccaagggctttcacctggaacccaaagtgcg

SEQ ID NO: 3227 - DNA, 7063 bp, Homo sapiens
aaaaaagtttttaaggaaaaaaaaacccttccctatttcctggctctgagaggatcagcgtgtacagccctcccgtggtagaatggcggctgcacagctcccagcaggcacggtgcagtgcacagctcccagcagtgcttagtcagatgcactcactcatctttcaaggagggtactgtctgtctggggagatgagccctaagaaaatgaaaaagataatgagctgtatgttttctaatagctggttagaaataggccttgtgggaacaggactagctttttaccaagatgttcctgcagctcagcacccagggcagtggggacaggagagagaagctgacacagcgtaggtcattggaatttcatttccattccgtctacattcgctgcctgcccgcctctgtgggcaccagtgttaactgggcaggcctcgcttcctgctcccattcctcctctcttagccaggaccacttgatacctatttcaggcttgtacccaccccgggttctgtaacaatcctagctcaagagaggaaatgtttaagaagcactaaagcaacattctgaaagtcactgacaagttcactgtaccagtgggcctgctgtgacccactgccgctgctttaaccaccagcactgacctcattcccaaaaccaagtgctcctctagggggaactgcaggcatagccatgggatctgggtccctggtttatgggaggggctcaggtcctcatcttgacgtctgcccagaatccagtggttctcagctgggggctgagcccagaatcacagggaaggctgaaggcagagccagctaggagaggtacagttcctacttcacttgttacaagtctgtgttttgaatttttacaaccaccatacattatttgttatcattttaaagtaccaatagaatgaactacttattactttttattttttttaagagagagagagagagagagagacagggtctagctctgtcccaggctggagtgcagtggtgcaatcatagttcaattctccctcgttggcctaccaaagcactagaattacaggcgtgagccaccatgcccagccagaactacttattgttaatcaaacttatgaaataaagatttaatgcctatgtcctacaacagacctgccatatcagggtctccaggagcaagaaccccaccaggcccctgtcccaaggtggagacagacacctatatcaaagcataaaatagatctcattgtgctaagtgttaataaaggtctgaataataaagtgctgtggcatgcctgaggaggaagtggttaagggttaagtccaagcctgtttctgaatcctggccctggggctgaagcctgccaccacctgtcctgcagcccaactctctgaatattgccacgtctgtctgcctgtcagcacagcgttggagccccttggtagacttacttgatgccaagtacccccctggtgtctgtggtcattgtgcatagatcttggtctaaaaggctgcctgaacttcctccatacgtgtcaccactgccaccctccctcaccccaccccaaacacacacacaggccttatctctaaactaaaagcctgtctagttccacctttcccactgcagtcaaccctcccataattataataattgtggccatcactgaatggccacctctgtgtaccaggccctgggtcagagcatgtcataagcgttatgtcttggaaggggctcttcatttctccttttttttttttttttttttgagacagagtttcgctcttgtaccccaggctggagtgcaaggcacgatcttggctcactgcaacctccacctcccaggttcaagcgattctcctgcctcagcctcccaagtaactgggattaggtgcccaccaccacacccgactaatttttttttttttttgtatttttagtagagacagggttttgccatgctagccaggcttgtcctgaactcctgacttcaggcccacctcggcctcccaaagtgctgggattacaggcatgagccaccatgcctggcacatttctccatttttattgaaaaggatactgaagtcagaaagaagaagtcacttacttaccccagagcacacagctagtaagtggcagaggcaggacttggaccccagctggctgactccagagaccatgttcccacagctggtggggatagcaggtccagccacaaagctggtagcactcggcccctcccgtggagaagctcccagtctggcagagcagacacggtgcagcacaaagcctctagctgagatagtgaagtaaaactaacatgtacagggacatctgaggaggaagggattttaagtcaaagtggtggggccaggaaggctcctttctggggtcagaggagactccaggaccatccttcatgtaatatacccattggtgctggttccttatctaaataaaggtatcagccaacattgagcatttaccgagctccaggccctgtgctaggtgcttagataagttacctcctggagtcctcaagccagtaggcctagatactcttattttctaccatcttacaaacgaagaaactgaaggtccgagaggggaaacaactggcgtgagtgcgcatgcctctgaagtgatggagctgggatttcatttactcacttgcccatccgatgagtttattctatccctgccacccgccaggccctgatctggatgatgaggggccagcagtgagcagcacagacaggcctttgcgtcatgagccttagatctcatggggaggggagccacagggaacaaacagacaagagagcaccagagggtgagggacactctgcagagagcctaaaacacagggcatgataggagccatggggattattttggatttgacaacccccgggtctgtccaatgccagtgctggagctcttggccactggtcctcactgtcactccctgctgagctcctgcaacttttggttgaggcatttgccccattataccttgttttatgtacttatgtgcttttctggttttttttcttaaggggtcaacctcaccttattcttttctgtatcctagtggcactgaatacagtgctagataatgacagatgggagagagctggggattccattggaaggggcacccaagcccaggcagtggcactggctgaggatggccagttggggccttggcaccataatgagaccttttagaggtgaaggctgtgttctggtgacaccagtgaagagaagggtcagccagtgcagggccagtgggaggagcacagtgtggacggaagggctgggacagaggagccagcaggagcccacaacatggtgctcctgtgaggaggtcagggcttagcctagaacagcagcaggggcacaaaaaaacacctgagaaactgtatgaagaggctgctgctggacttgggttggaggtggccctgagactttgagaatagttatgctaacaaaaaggaggagttttagaaggaaagctggttgtgtgggagataaaaagccaatagccttcactgagtgctcatcatgcatgaggccctgtgctaaaatctctgccttgtctcactgaattcccattacaatccagcagggtcagtgttctcatgatgcctgctttacagacgaagacctaaggccagaggctaagccatttgccacacaccacagaggcagtaagtggcctagacagggcttgatctcccatctgtctgcccagtctgtgcccctccaaccaccccacccccaatccactacctcctgcttttaatgacttggatgtggaatcagttacatctgagaacaaacgacatagtctaggggctgcagccctggggagaatgtgtgcctgagcccgtgaatttagggttttgggcacaaagcaaaatttggagctatagaagtggggttttactaaggagagaagagccaagaaattgaagaataatctgaggtgggagagagggcaggaggcagaagatgtcacccatcagaggctgcagagggcaggatggatagatgagcagaggccaaggccttcggttggggagaaggagatcttggctgagctcaaagggtggttttcctggaagcacaggaggccaggctctaagggttgagaatacaagtgaggaagtgaaaggagcaggaggctcttagagggctggagttttgaaaatcaagaaggaccaaggacaccatcaggttgagtgccctcctctcaaatgcagaaactgaggcccagagagaggagtttgccccagaccacggaactaggtgttctgacacccttttcattgcaccatgctgcctctcttgacatgaagaacagagaaagaataaagtgtgaagacatgccgtggcgattttaaggtgcacagactttatctgttggaggcagaaggatgcctcgctggaggtacgagagcggtaaggttgaaagagaaccagaacattagttcagatgttggctgtggcgtgtaccagtcaagggacttaagtgacttcaccctgagcctcactttcatcttctgtaaaatgataattataccataatgtcaataatattaggttgatgcaaaagtaattgcagtttttgccattggaaataatggcatataaacctgaggcatttcaatagagagaggagacataccaaacacagagcttctcaacggctatgaaaagatgatgagaaagtcccagagaagaaagaatggagagacttttctttcttttttttcttttcttttctttctcacttccattgtattataatcccagcccccaatgtgcattgtgggtgctggtggggcagacatgaccctatggcacctgcatgacagagggcctcggcctccacaaatgctcacaacttgtaaaagtcttttcacagggtcagcatccagcctgcccactaccgttgcccgttatcattgcaggttaattttgttgcagctattgatgtgtacgaagatggagaagctggtttgctgttgtgttacaactgaaggaactgaaaaataccttcctccctgagtctcccgctgcgcaccaggcctcttggtgacacagtgcaagaactggcacttgtgatgctatctccaggatgcgccagtgatgacaatggcttccagttaggaggcccttactgtgtgccaggtgccgtgctcggtatgctgtggtcattgtctcacttgattctcacaatgaatgcccgcagcaggctcggttattatccccagtttagagatgaggcaactgaggcctagagaggtgaactcgtcaaggtcttgtggctactaagcagcagggccagggtttgcatcgggtgctctcttgactccagcacccacaattttaaccactgtcgctattctacattttgctgtttctcaggtattaatgaaatcagcctcaacccagggtatccagcctcagttggcctagtttggattaggtggcagggtaggtgttgggcagaccaaaggtatcaaatgggatctttaaggattttcagcatttcaaaagctaatattataatacattttcataaaaatgatgttttaagggtaaaagaaaagaagtaagctattttcctagataaagctgcccagtctaacaagacataaaacatgtttttcggcctaggattttatcaatttagagtggtaatgctgggtcagatgttttgattaattaatctttgattaataagtataagaaagctaattattagaagagaaggttgttttataaacatcatctttcaaaattcgagatttatggggaataaattaggagaaggtggttaaacctcttcaacaataaattgctctttggggacattttatgcacagaactgtgcaccctcctcagaacagcaggtctttaatggcccatgtgatgagaagggccccatcaaggcagcaggaatgggccactctcccacaccccatgggccaggccactgccactcctgctgccctgcatccccaggtttatggctgcatggtagaagtcacttctgtaagaaattcacctttctaaaataaagtatgctcttttttctgagacatctatagaataacttgtggcagagtgttttaaaaactgatttggattttttttatcctttaaccgtgtgaaaggatggaagggattttaggtggaagagaagttaagaacagaaagatagagcaggtttttagagtgggagaattaatcccaaagaaaaagagggcatggaaacaaatgtggatgccatgggctctgtgccagacttgccagtgctgactggaacaggccgggctcctcactcagcggctcctgcctcagctgtggttcccgcagcctctgggtctcacggaacccttccttgggagttccatttctcatggctttgctcatcttccggcttcaggctctgacttcatctcaggatgggatcggtgtgtgtctgttttcatagatccactacatcagaagtatctttacatctctgtatctttacatcccaaggtcaaggccctggcaacctcagaggttcccatagcttcagtcttccccaaaccatgccacttcctcccatttctttgggtcaggaatctggcttttgttttccatatttctttttcccaagacattgggaggcatctggtgaacaacaccaataaaacagttctctccccacggtcatccaggtcacttctctaactcattcctgcacacacagcacacgtggaatttgcctgtttagtctatgttcttgacttgatcacagacgcctgtacaataaagccccttttcaacaaggtgctgcagaatgataatgctttccccaaaatctgaaactgatttgtatcattgaagtttttttctgtattaaaaataaagcaaaattaaaaataaactttatgtggaggaatttttatctcagatatgttagagttgaaaatattttataatggagattgcaactttcagttatgtgttatttgaaaaaaatatatattcacttggtaacctttag

SEQ ID NO: 3228 - DNA, 5456 bp, Homo sapiens
ttttaaaatacatatgtttgtaaattatgtacatatgactacataatatatatgtggcatatgcattatgtgtatgtggtacatagacattacccataacaattagaaagtacctctgtctccgttttacagatgaggaagctgaggcacagagagattagtgacttgttcaagatgagacacacgctggtaaatggtggggctaggggttatgtatttaatcaccaggtgatactactatacctccacgactggatgtttcctgggtgtctcaggaggcacttcgatttttgcagtaactcaagaactcaccagtaagaaccttagttaggagttcgagttggtaggaaaacaacggaccaagactcataacctttcttctacaatttacgagttgtatatacttgggcacatctcttaacggaatctcactatcctcatctgtaaaatggagattataacatctatccacatacttcatagaggtgtcataaaggcacgtaacataatgaatctaaagacccctgaaaacccttgaagtgctacataaatattcagaaatggtttcttacatggtcatggttaggtctggaatgctgtgctaaggctttatcactctgagcccagtgccccctttcactcatctgtgctatatcaatgtgtctttcaagcaaattcacatgctaatctgtgttagttcctattctgcagaaatgagaagtgttaaactcattctttaaatataatcccctcactgctatgatagagaatgtgttacaccattaaagaacccacctctctttttttttttcaaatttaagaagcattactttccttttctccttctttcctaagagactagaatcctgtattgcaaatggaagttccctcaataaattttaactgagtagaatctgggatgctcagaatggaagaggtctcttgtaagctggaccaagactttacagataggaaagctgagggtcttatctgacatcacccagcctattagggccaacgtgggccaagagcccacgtgtcctgacttccagcccagagccagttctgcttcatgaccctgccccttgcactcagaagctgagggtatttgtggtttgtttgttttagtgctttcttttattactgatagctcttctgcaaggaatgcctcccctctctaagcatttattctttgttacttacagaagaagactgcataaactgggcgtgtcaaaggtcacccaagtggatttcctgccaagggaagtagtgtcctactcaaaggagacccagactcctcttgccacgcatcagtctgaagagctcttcatgggatacaaacataatgacactgaaagccaaagcctcttctgagtttgaaagctatggagagggaactcggtgatactcttccaagtgacctggcaactttaaattagataaactaaagaggtttatctcactacatcgaaatcatgtgaggagaacaaaaatcatcaaagaacaatgtaatagaaacagtgctgaattttatcaataagaatacattaagcatacattaagaatcttaagcatacattaagattcatcatttacatggcttagcaaactatagcccacccacctgttcctagaaataaggtgttgttggaatacagctatatccaaccattgacttctgtggttactttcttgctgcagtggcagggttgagtagttgtgaaagagaccttatggctcacaaagcctaaaatctttattataacctggccctttacagaaaacctttgctgaccactgatttggtttgccaattgaggtaacaacacacgagagtttctgaccacaatttaaaagtattttcccatgcaaactccacataggtgaatggaaattgaactccataccttctttgtgtatgccagaaaaatatcaagtgaaaaagtcacatacgggtatcagagaatcataaaaatacactcatgagagaagtcgaagttgataaatacttcctagaattcaaaactttatcaaagcaagattatgcaaaagcagaagagggagatgtattttgaaaatagggtaagtgaaagtttcattgttagaggctaacgttgttatagcaaagcaaatactctttttactttatgttattttattcttcggtgggtgaagaggatgttggaattctgggttccttgttgctatgtagtaagtatggacaaaagccatgaaatgcaaaaatgattagcatttcccccttagtgatttaccggaaatataaaaatcagtgcatttttgtttatgcaagctacaggttttcagttttggttctaaataaataacgccaaaagcaaagtgaatcagattccttgaagtccggggtgccgttaggcattctgaaaatcttgcctatacaagctgttgtggggacagttcttcagtagcagggcctccatttctcaagccccagtgaaatgaattttagaagcaaacaagtagcaccctctgctggtgagcttttaaaccaaccaacccaacaaatgagacctgtatattaacgtggctgaaaatacagttagcgagggggaaagaaagaaaagaaaaagaaaatacaaaattagaaaagcctgtgagagttcacctagtctatccttgggcctccagacaagaacaggaagatcgttaaaaaacatcctcaccacccaaccaaaacatttgtttgacttaatttgctgccagaggtatttgcagagctgtagctggaggcatgtttatttagcccaaaacttgacccatagcataaagttatacaactgaaataggagaaggagtgaattattttttaaaatgtgtacttaagatattggaagtggtaaagaaatatttacaagggaagataaattaaggatgaaaaggcatcagctctaaagttttaaactggagcacatcaaaaggaaaaggctgtacattccattttattactgcaaggagagcttgggagccctcattatgctgtggtccaagcagcaggaaagggggaatttatttctcagctattggcagaagttctttctgttttgttcacaagatccatcaagcttttttgtggtgaagggcatttacatggttcagattacaatacagaacccaaagctagctaccatagttcttgacatttaagcaatcctggatggatttggacagaaaaacctttcaatttgggttcagcaaactgcccctcaccacaggcgatgatgccttgacccttggctgccggcagtcacccggctgcccggccatagagggtgctggtgctcactttcacctgctgtggggaggtggttggcaggagagctgcgtggagcagtggacagttggcactgaggttctaccatgcggcagatgtgggttggctccactgtggggtttgagccatggcaatgttttcatgaaaactgcgcctttcagcggcaggaaacaactacggaattttatgacacaatgaggctcttgggtggctaacatttgaagctctggcatatataacatccactttggcttgctgttgcccacaatgtaagaaggcatgctgattattttttgtcattgtttgactgtggacagtttaatgataatcaaactaatgatctcagagcattgatttgttctgcctctaatggattctagtgcattcaagttcttacacattcccattttacttttgaaaatgaaggggaaggcactttggatttgcccaagcttaagcatcctttctgtactgtgcaccgtaatgaacattctcatcatagtaagtattaatttttgatcataatgatctgttatgagaaacactccagacagtgatataaataagcaagatttaagtataaattctccatgaatactgttctttcaacaaggttagaccttccttctctgcagggaaagaaggccaagaatggccaacactgacttggagaaggatacctttgccccaatatatttgaaacacataattttattcccaagtagcaagaaaggaaaacgaaattatggtcccctccaaggctgcctctctgttgcctattatgaacccatttctgtaccaaccatgaggtcctgggcttagggagccagtcttttgcatctttattatagtgagtgagtgcatggcttatcctgagtacccaagaaatgctgttgaacgacaaagataatgccagacatctctagaaacaccaagttcactatgttccccctgggggaatgagaatttcttaatctgctggaaagatgcaagccacactggaggaaggaggaggaaatttctacaacctggtacataatcatagtttgttttgatagtcacctggtatcttgtggtcaaggtttaatctctactcaggcccagtagcaaaccaagacatctctctcaaagggagagtaatgcaataaagaggccacattattattctaaaatctaagcacttcttctgagactcacctcttagggacatttgtttgatttgccatagacacttggggcaccattgggtcagctggaccataatttccaagtagtatagccatttgaaagaaaaactttcaaaccactgggtaaatggattgaataaataggtgcaaatgttgaacatgttgcctgcaaaacccagaatgacccactaagcatttcgactcttaatattagagaattaaggtattcacatatactttggagtttaccagatgactagaccaatagagactttcttaaggtagcgagtacttatgttttcaaagatttttcctccatcctctggcctacataatgtcttaactaggtcttaaagataccagctacagcttcctctccaggtcctgctgacatgatgctccatgttgaaggtgagattgacaagggctacagatagagaactggctcagccctgaggtaggatgatgaagatgcaaagagaaaggctgcaggtctttggctgtcaagcaaggcttagtgtagaacatggtttggaggtactcccaggcctccgtattcttacctacattcaatttcccattatttcctgatcattgctgtcactttcacataagtcacctggtgacactagcaattccacagaccttattcagaaacccacagaatttaaactttgcatttgactttgacatttttgtagatacttatcacaagcagagaaagtccatgggtctatgcctagatctaaaatatagagacttcaacctgtcatctatttcttacagctgtccagtcccattagaagtatccacctcatcctagtgtctttaaattcttcatgccactcacactattcaatagcagtgaaaatttgatcccctaaatccttcttttcaacggacacttcattaaagatcaccatagaagaaaaattatgtagctatttgttacagctgac

SEQ ID NO: 3229 - DNA, 1668 bp, Homo sapiens
cttttcgattcagaaaatgtatactcaaatcgtgcccttctctctgcagctcttcccctgcttctctcagcagactccctcttcctcaatgctcccagggacgtgctctgctcctctattataacgtttgacacccgcttacattaattcatttttaccatgtttgattttctcattctcatttatattatgatttttttcaagcttgggatacgaagctgtattagggagaaaggttgcacagtttaaaaaacacgttgatattatcatcacattgactggatgttgggcattgtatttcttttattttggaattccagataccatgaaaggatttgagcgtttttttatgtgaatccaaagatgacatttacaaaaggtggagaagcagttccctactgagggacgtggatacaaaaagcagatgacacaacacatcccatagagttcccagggaagaatgaacccagattcttgacctgcagaggtggcgtactggctggagaaatctctggctggcgaccgtgctattctgtctgtccacctaactgtgggctcccagatcaccactgccatgggcagggggccgtggggtgggcctgcttggggtgacaggctagctgtgctcccatagcagaggtgggagaagggaatcacatctggtgagcagctatgtcgtgccaggcactgtgctgtgtattgcacacatctcaaaccttgtgacaaatgtgtaagatattttttatgtattacaaatgaaggaactgggctcagaaaagctccattatttgcccaaattgcagcagtaatgcaggaatttgaatccacattaatctgactccacaacccatgttctttcactgaattcccatatccttgttccccctactgtcctcactggtcaaggtgagcttggtcttccacaaacaggctagaaaagtatgcttacttatctttagctttatgcttttaaactaattcttaaaaatcttctctggataagtcaaagacaatgggaatgtgtatttctaatacattaattataatacattaccggtttacacaatgccatcaccttgtcattttctttgacacaacgtccccctcccctctagtttataaatgaggacattgaggcacaaagtgggtaagtgacttgcccaagggggagatttgtccaatcataaagatgggcctgaactttttctactttgcattcttacttgaaaggcaggaaacatatgctcaagagggagatctcacgaaatttcatgtcatatagtgctctcgctaatttaatcctgtcattcctggttatatccctttggaaaaaccaccaccagtgccttctcttttgatatatttacagtaaaaatattccctgtacaaaccatctcactctttcacagggaactggcttggccctctcccctgaagtgggttgcacatccacccagcccacccccagctcactctagctcccttcctgttagaatttattcagaacctccatttctaggaggaagcaaggagggggcagttatcttcgtggacttgggtcctcctggaccctttgtcctcatggttatgtttcaaacagagttgagggctccctaaaggggaaagattatttaagttttgtaaatgctgccctccaaaaaccactcc

SEQ ID NO: 3230 - DNA, 13604 bp, Homo sapiens
gatctgatgaatccaaggagtggagcaagaggcagattttggacacggttatgagaatgacagaaactgcctaaagcatttatgctctggcattcgtccctgtttctggaggtccagtaagcgcttcccaacagaggaccatctgatgattcataggcacaaacatgaaatgactttgaagtttccttcaataaaaacagacaatatgttatcagatcaaactccgaccccaacgagattcctgaagaactgcgaggaggtgggcctcttcagcgagctggactgctccctggagcacgagttcaggaaggctcaggaagaggagagcagcaagcggaatatctcgatgcataatgcagttggtggggccatgacggggcccggaactcaccagcttagcagcgctcggctgcccaaccatgacaccaacgttgtgattcagcaagccatgccgtcgcctcagtccagctctgtcatcactcaggcaccttccaccaaccgccagatcgggtaaggagccctccttggctgcccctgggtcctggctggaactcaggaaatgtcctggacttcctcctggtttctggtgctcagattggttggtttttctggctgtcatgatattgcctagagctcagagtgatgcttttgatgggagaagggaggagtctctgcttggtagaagctgttttgatcttggactttgggtggtaggggtagggtggggagcaagtcattctgtgtcatcatttcttcagacaagatttatgaactttaagatgactgtgggaaaacccatggttgttatggagaccagagtatagtgcgcagaacaaacatggtggagggaagttctaccagctcagccttgtctccaacagagtgtgcccttcccttcctgggagctgccacactcatcacctcatcttctgtgtacagcaatccctccctgtccgtgagagataaattccaagctgcccaatggatacctgaaagtgcagatagtaccaaaccctgtgtgtgatatgtgttttccatctgataactgagatagctattaagtgactactgggtggggcgtgtccacaatgtggacacggtggacaggagggatgattcacatcctggggggcatagcttgggacagcatgaagtttcatcatgctactcagaatggtgagcagtttaaaacttgtgaattgtttatttctggaattttccttttaatatttttggaccacgattaactgaaactgtagaaagcaaaaccacggataagggggaccaccatatttccacagtcgtcccgccctctgcttattcttccctgcttctccttcttgtaactgcctccttactagccctctccttcctgttactgcctccttattagccctctccttcctctacattggtccatgctgatttctggagtagacaaagcaaagaaagcaggcccctctctctcatttatgcaaatggtcaatactgaggcattgaggaaaaattggtagaaagatcctgtcattgaacaccagatactccatgtcatgtgatggaaagagctttcccttctgggtatcctgtgttagctctagcccctcgcaatgtgccaagtgtggtctgaggatccgcagcgtgggcatttccagggagcttctcagaaacgcagaatctctggcccagcttccttatccccagaatgaggatggtgtctgctctttccagcctcatgagagtaaagatgaaataaaagatttaagagcacatgggttcttaggaagaaaaggtaataactttaagccaaagagctgtgatacagttctgttgctggtcgctgagaactggctgctctatgcttccagaattctgtttaaaatgagaaggggcgcttgctgtgtttggtatgtgcatcaacattctgtttgaattttcagtcaaatattggaagtgataattaaaaacttagaaactgctccacaatttgtcagtaggtcttttccctcttgtttttcggtgttataagaattccagacctgcagggaacactggcttattcctccctaggatattccagaaggggcaccttgtctcacattttcaacttaccaggaatggctgtgatacgttaagacccaccttaagaaatgagagtaatgggtaatgggtaatgaccattttgtgagtttgctgtgggtgcgtttggttttctattcaagaaacagaacattaacctggcccttcgaatgctcggctttgttgaaaggagtcaatgctaggttggtaagtgtctctgctaaagatttcttttcttctcaaatgaccatgagagcaaatgttgctgctatctaaatcaagaacccatagagtgctaagagggtggagtagattcattaaagacagcatctaaatctccagggacttctctcaagtggcttggctttcagcagacaattcacagttatgccagctaattataattattttatttttctttcaaggggaaaaaacataaaatgtgctagagtttactagcagttttacagcattccttcccccctggagttctcctgcctccctctccctgccaccccccaccaactacccttttggaggcccttagtattcagccattgttagcacaaagctggtctttatgaaacagtcttttgagggctagcaataaagtttaagatgagtgctgactctgttgataatttacccagctggcccaggactgtacatttgggtgacatttgtaggctgtgtcaccatgcctggatggaggcgggtgtttctgtggtatggacgccttttggacacactccatcttcccatttattctccagcctggggtgttgtgtgtcgctcctggtgtgttctaggagataattgtcacttttaggactctgtctcattgccaagcccgagggaggctatttcttttattcagattcctccctggtgtgtttgccatgttgattcaaacccacacatcttgtcgtttccatttttctccatccaaaaccttgcccggatgatcctggagactcagcaagaaataacccaacccatctcaccagtggattcagtatgaaactctaggtggtaacatttggggacggttgactcttttatttctctcaggaaagaggaaatgagtacttatttgaaaacacgagttccctctggagactgtgtctttaaatgagcatttgaaattgcagatagctttttttttactttattttttttgaggctgcacagaaccatattgtagtaatattctgatttttatcacaacctcaaatatttaagtgtcaaaatctggccaagccacctgcaaatgtttgccatggctactggccaagaaaaacagcaaacagcaatgaaagtcttcattcaggctcagtgcttaagctgcatccagccagaaaggctgggacccacctgtgcccacgcatagtgctcttgtgctgcggccagcgggtgtgttcatggctgagactttgtgggagaaggggccacctggctcctgctcccccctcttcccttcccttctatcagtgcttggctgctgcaggcaaccccaagttttcgctcttctctgtctccctcttttcacagtacaaaatttaagcttggaggcttgaatgtattgagagagctatcaacataaaggacttgaaaatgggagtagtgccagttatcagggaggactttggggacaaagggtaggcatcctcataagcatttgattttcatgctttttgaacaggcactgagccaaaccagaccaaaatgagtgcaaatgcaaaaatccaaagaagtaatgttaaaaggaagtagacaaacaacacgtgcaacttccattccataccacagcaatccataccatgccctgcgctcaattctgtgaaagtagtgccattacctcaatagaaaccagaggtaaatataaatatctcaaattgctcttgtgtggttgggcagactagaaaaacacacagctatggagagtgtgggaggcatccccaaactagtgactacttgtgcttagtcaaactggcagacgctctgccgggaagagtgtctttggctgattgatggtagcgttttcagagataagtttcccagatggaaaaaaagagtgagccatgggctgtggggaagacaagtgagacagaaaacaagcatgtattaaatagagataaaatcgatccagccttgaaccaaatatgtggcagaatccaaacagtatctctcctccagtcatttttattagctatcatgtaacaggctcattaattcaggatcaagtcagcaaagcctgggaaaatggcagaagggtaggtagcactactggaagttaacacactctctctgtctctttgtttcttatcatctaagacatttttgtaggagtcaataatccgttgagtagatggctataatcttaatagatcccagctttcttaactaagttgattcttctttatggataagtgatagtatataatttacactcagtaattcttcaggagagcaatgaagataatatggaatttggagttctacaagaatggatatcagtacagagctctgacgggttatgggagacgcttccaaaatattctacatatttttttcttaccttttacttctttgtagggcactggccaaatatatctaacattagaatatacaaatgtggagtattctggttaagagaatgaattggccagctgcatcaggaaactcagaaatatgttcaacagaatgcatatatgaagacatttacgtaaaaaaaccctccctgattttacaccaattttaatcctggaacatatatttccacatgatgcgtaacttaggcatttggttataaaccctatttgcatggggctgtagctagacaacagagacataaaacttagccagaaatttatataaaatatcatagaagaaaatcttgttttatgtaaagatgaaaaggtgccaagacttataaattgtacctcctcttaccttttctgtgcctctttatcccttttctctttgcaatcccagatgctatgtgtcatgcagaatattagatgtagttcaatggacatggctgaggaaaacaaacaagcaaacaaagaaaaataataataaaaagaaaagctgattacatctcaaaatttgttggtggcagaagcaatgctacgagtcatgtggctttgctgtgtgagttcacgttcctgcccagtgttccctcaagatgggaatgttaatacatttgagggttttgtgtcattgttgctgggggtggggaaagaacagtagagaagtgggtaaatgatgccatcactgaaggtcatggcttaaagaagacctaaatgacaaagcagcttacaggttaagaatgtgtttgccctgtcaatgcatatgcgtatgaatctatttttaagagcttcctaaagctcctcaaaccaaagtgagcatgagtaagactgtcgctatctaccacaggctaatgctggggatattcaggccagcctccttcctgctggagacagcggggcagcaggtcccggcttgtcactggtcctcagcccttagccaggacaacttgaagcccctttgagtaatgcagaccagaagtcattatttcctgctttgtgttttgctgaatatcacggctatgaacatagctttattgttggaaagttgctgtatctttcacagccccgagaacatttacgagggcccttctgggggatgctttctgggagggttgacagacttaaccatatggctcccgttaaatcccatgcagagccttgagaaattacctctgacaagggggccggcagccttccactcacggggttttatgtgtggaacgaaacataaagtactgatacttgaggaaatataatgtttcttaacattcaaaagttgtaacaccacatggtattgtggtcagatgaagggggtagagccagaacatgggagcaaatggctgggtattctgagaggcagaaaaataccccagctctcgtcttcgaatctggtccttgcctctgattcttcaggcaagcattgtgtcttagtgtcatctcagcttcccacctggaacacagcaagcctgctctactcgggagagaaaatcagaggtaactccccaatggctcaagcccttcgttagaaagggccttgatactgacactgaagaagagaaaggaagctaatatttattcaggatctactacgtgtcaggcattgagctagctttgcatgttatttcctgtaattcttcaatagctcagagaggtagctgttatttaccccaatattattgctccaagaagaaaagtaacttgtccaaagtcacccagccagggagataaacagagttttgaatatgggtctattggactcaaaagcacatgtttccccatgctcctgaccgtggcaataccagtgccgtggaagacccatgactgtgcctgagactggcagaatcatctacaggagttagctaatgctcagtctatctgtttacagtgtcaaacacttcatcccctcatgtgtaagaaaactatagcatcacagagaagtgatggccctgtctccaacatttggttgctctatatttggcttcttagcttgcaggaagaccactattccctgcccaaatgcaattcaacttccagatttgttccatttcctgaggggacagttggctttgcctgtgagcttttcttggaggaagacttcatttctggaacttctacacagaacctggccctcagagttcctgaagcttccatgtaagtgtctcagtgtgcatttcctccctcctatttttggaaaagataggcacaaatgagggactacttctacagcaaccagcctggaatcattctttctgtgcttacagtaaatctagacatttgttcttttgtgcagcatattgaaaagatatgcctggaatacaagagcttgcttggagcaaaaccatggcaagtcagaggggagtcaaggaaaagcattgtcatgggttcagagttcatggattttagacattcaggctctgccatttaaaacatttgccaccttggctaagcgctcagcttccccaggcctggtttcctttacctacatataaaggggttagccaattaattgagtcagtctcagctccagaattctcattcactgcctcttttctgtctcaaatttattctctcttttggttgttttcttccaggagccaagtttggcagaagctctagattatctgacctcctagatatgttcacatagcccagagagtgagaacagaatagggtttgggaagagaagcccacggcagtaaaagggaggggtcctaacatatgaagtcagagacacttgacttctaggctcaactcctaggtgaataacagcaacctcttctctttgtcaggtgctgtttacaaggcacatctctactagtttggcatgcatgattctgttacccaggaattaatacacccattttgcagttgagtaaagtaaggttcagagattaagtgacttgccccaggtcatagtgataatggccagagccagaactcgaatccagaccacctactccatgcactatcccacagttcccaagaaacttaactttcccaggtttaagttttttcacctttaaaattggggggtggggtaccactagaaaattcttgaagttcttttcagcactaaaatgttaattattttcataatgaatttaattttgtaaactacttggtaaggtaacttctctggggactcagtgctgcgtgtgtgactaggtatagcttcctctcttgaagtaatcttatcaggaaattgttcttttattctcactctgctaacagtggcttattttcggagctttaactagaaaaacaactaaaatagtaaacatgtaaaacaagtccaacgcaagagatctggatgatggttttgccagagacagttctatgggaaaatgcagtccactgtcttgtattctagaattattattatttggggaattattttgtggaagatctgaaacacagctttagctcatatcactggttagtgtcttcctctgtgtaagccttggataaggtgccatgtgagtgaatatttgggaatgagagtatgtagtctcccataacgcaaactgaaaaaattagctgttcttttctgtacttgtcatagttcctacatcaagattggctcagtatttcctgtttacaaatccagaagcaagaatgaaaacctagcaggttcacatggcttgtggtgtttagagagagtcccatgactgaatataaccatttattgaagaatatcaaaaagagaattaacatgggaaaatgattagtatgtgcagtgccctgtgtgaactgaacatgttaggagaaatttgaattgaacctggttattcagagctggtcctttggaactggaagtacactttgcttttttgaagattgaacacgtccaagtaatagggcggtgtccctgcgggcatttcagatatttggagcttttatattctataatactatatgtctcctaaaatgtaaataactcttgtctgaactgtttgatagattctgaattaaaaaagaagcattaatctagaaatttggagatagcctatgatgccctttgcatgtatgatatattcatgtaatcagatactttgagattcaaaagatagctcattcaacagcttctttactatctatttttcatttatgtttcaccaaataaattttctctacaatcatcttttatatcctttctaatgaagatttaaagattacataaacaccattagcattttacctttgattgaatcagaataacacataaacatccaatttgatctcaaattttgaatgtaaagggaatccttgatattaagattctggtatatacagatggaatcctatttcaatgaggcagtgcaacatcattgctctagggatagaaagccaaggctggtgactctgactgtaccatgcatgagctctagactttgaacaggcttctttaccttgctgggggcctgacttttccatcttgtaaaaagaaagaatgaaactaggttgtctaataaatgctttctcgtagctcaaattcccaggaattctgaaacaagctcttaggaacaagtgtgtttccttatcatggctcacaccctacaacaacactacttggctgacatagactgctgaagaagaattctacaaaacgcattcattcacatttagcaggtagtctagtaatccatttgccaggtatgttgtgcttttggcaaatatcaactaaaagttcctgtagtgtaataaacattcttaatggtaccagacacatttcaaggaatttggagttttatagttttcccccctttggcaaagtgcattttggctgatgattaggccagtaaagtctgtaaaatgataggacccttgtgagcattgggtagcgacatgatggaatgtgcttggtttgcttttgcagggtcacagaactttgcagagaacagatggccccaaacatctttgaaatgctagaaatgacttcctgaataaccacatgcccatcatatcttggtccagcgatggtaattcacaagccaaacacacagcactttacagctgacctccaatgtattatttttagtctatggaatgcatgaacattttctacatgaataatcataatgataactggaacctggaagagcaaatacccatccccgaatcactgagccattgaacacttgtcagatgagcaatgacattcttagaatctataggggcaggaggctaagcatttgaccgactctcagggatctctgcttagcaagtcacttcatctcatttttctcaagagtcttgctcaaattgcatatttaaagagataagcagtaaggtactagattaaagagaaggtaaatgaggtagtagctgattccattccagtattgtttgggttgtgggagggaagcctactggatgaatctgcaaactcagtgaaaccagtctacttctaaagtccttccaaagccccatgttgagtcagtgtatatttaaatgccaaaactaaacaaaaggcaacctatagatgcctactccaaatcatagactttctaaaacattgaaagaattaatttaaaataattcaactaagcttcatgctgttagaggtgactgatgaattttacagaccaggtacacccaaataaaaatctgatgaaataaaagtctggaattggagaaagttgaagacttttaactaaaaggaaaatgaggggtgtctgtgtgtgtggggggggcatgtggtgtcaactgctagatttgtcccaatccccccccaccacacacacacacacacacacacacacacacacaatagatagctgctacttatttaacgcagctctgtagtcaggcactttgcagagaaccagaggagtgagtttgtcgaaatctcatttggcaaattggtgtgtgtgtgtgtgtgtgtgtgtgtgtgtgtgtgagagagagatagacagatttttataaaaagagtgtgtgaaactttggctaccccacctgaagccacagacaaacagccttatattggggccactgcattccataattattattgccattaggaataattattatttgcttggttgagttggcagtttggagcctgcctgagacagaggcttctcaaaggagccacagaacacaaaggcccgaccaatcacccacaagtgcttcaacatgtttggacgatgtccttctcttggttcatttcattgggtttcatacccattgagcttcaaattgaatgaaaactgcatcagatacaaaaccagcatgaatgagtgctggtactcaggaagcttttttgattggaggtctgaattcttggcttttctcaagtctggagatgaaagttaatttttttcatgacactgtgttcctctaattaaaaatagaaaaatgaataacaagatgggtcttcagttagaggctaggttcgaaacagtctgagagacaaagtgcagaagagtgaggaaacccccagccaaaaagcagcaaggctgtttaggaggcagaacagtgacaacttgaactttactttttcccaatgtgtttaaccttcttgcacacaaactccagattccagattttgtattatttcttctttcctttgctgtatcattttgaaataactgtgcccgaatattcctccagccttctttagggatctcagagaaagtgtggccaggggattttttaaccagcggagtgttcacaacagaagctgcgcctggtgaaaaggctcaccaagccattaaagagaaaagagtatgacaagacattcttccagacgttatttttcccgtagacttggttggttccttgccaaggcctgtaccacagtcacaggcagaggcctgcgggtgcttaaagagaatcacaaacgccctcaagtatgggtgtctctctcctcccctttacctcttcctcccatagtggttgtttgtagctcaagtggttgaatcagaccctcaagagcttcctaagaaaggctgaatcagaagaaaacacccaacagcctccagttattgtatcaggcccactacagtacagtgaaagttagctttgtctccacaggcacccaaacaatctgtcaagcatcgcaaagccaactgtgatttttagacagggcagggaagacccgggtgacctcactagaagcaagggaggcgccatgtctgggtaatcaatgccctgtctgcctgtcaagaatgcaggtgacttggtgcacaccttctcacagatgtagtgccagggtggggtgagaaagaagaacctcctctcccattctaggcattggaaagatacttcttttgctattaccctttgcacaaaaggttctttgggtgaatgcccctgtacgaataagaagtaaatgaaagttgcactgtagtgatttccggggatttgtggtcctggatatttatatagaaaaactgtttagtgggaaaatattgcaaaggggcattcctgtctgggtttttataaaaggtgacaaaatagtgctgtaaagaaacagaaatcccacactttctcagtagtattaaagcctgtccttaggtaaaatttcatgggagtatagagttgctgctttttcgtttttcatttgttcttggaatttaggggtagagaaaggccaagggaaatggccttcatcagcaaggagtttaataaagacagaactttaatttgttcattctcaatggtaaccttcacggggaaccacatttttactaagtcacagtagtgtattgtttgtatcagttcttaatgagttccattgttaacttttacgtcaaagaccctgttgcatcaacttctttttagtcttatgataggaagcttgttttcaaggtgtttccatgaaaagcatttgatccttcatatttccgtggtggatttctctggaaagttgggagttttccaaagtctaactgttatatcagtttttatggtgatgggtctcatttttcttgtagtatacattatcttctctactaattgacttaattttcagtccttatctccagtcaagaaatgaaaagaacttacaaattttgttaattgtactgaaattagacgtgtggtgagttttagaggagcgtccaaacagaactggattccatcagagccttgaggaaagttagacggcagaccccaagggagaagagggcagaacacaggctgacatatgacaattcttgggaaactgtttaaatttcttgggaaaaacaagataactgatggtttttttaaaattaaataagtaaatagcaggcagatcccagaacattgtaatgtgaaatctaggtgccataatataaagatgaattattaaaatatgggcacctcgaatccactaacttgggcccaacagagcctgcccaggggctgccaagcatgaggggtgtggagattggccaggtgggcagggctccccatttcccaggtatgtcttcaaccacagcagcttcacatatgtgaacttagttgggtttccacataagcatttctttgaacaaagggctcttcagcaagagcatagtttgaaaactacaaaattggaagatgcttttttctctatgtaccacaaacaagaggaaaagtgaattattgggtatgataaagcaagtaccatcttaaagatcaatttccgggagaaccagtgatgccatcatcatcatggaaagtggatgagattggacaggcaagctgtggcttctgaggtgataggtgattgaggggagaataaaacatgaaataacttctagtatttggatgcgagggaagaaaatcatcagaagggaaacatagagacttgatggggatctgtccatttcaatctctcaggaaagggtagaacaacaataacaaaggaagttgtatcatttcagtctacccttttaggcagggtacacttacacatgattgcaagaaggtgcccacagcactgagcttcaagaggagcagagaggcagc

SEQ ID NO: 3231 - DNA, 2647 bp, Homo sapiens
gttccaatgagaatgaaggctgaggtgtgcgccttttttttttttccttcttagtcgtgtgtacatcattgggaatggagggaaataaatgactggatggtcgctgctttttaagtttcaaattgacattccagacaagcggtgcctgagcccgtgcctgtcttcagatcttcacagcacagttcctgggaaggtggagccaccagcctctccctgacaagcaaagtggatcagcaaaggctgcagtcaccagcatcttttccaaccttaatgaactgtatcctcaaaagaacactatcagactggtaagacaagcattattgtcccacttcacagatgaagagcttgggggccctgtggatgtgtaggagagtcggccttcctttttataggccttttgctgagctcagaggacagagcagaagacaaagccgaatgcagccctaagcagacactatcccagcccaaggagctatgcagacagctcctgcctagaggagaaacaattctctccttcagccaggcatgtggcacagaggtgaacaggaaatgcttagggagacagttcacagatatatatgtacttcacagggcacaatttaatccataaatcaatcatggatcaccgctaaagaaaacaaaatatgctgccactaatttgccaccaccctgtgagcatgattggatgatgtttattttgattaggagattgctccatttataaatcttcaatacatcctgtccccctaaaacggcatctgggtcttttgagggttaaaaaaaaaaaaaagtgaaattggatgagggatgagagctggacttctgtgtgtcccggggtccctggatccacagcctggtgcctagcatcagttaagcccacgctggggtcgcatcacatcccgcaaagccacgtgctctgtgaggccaacaggagccccgccgggtggaccagctggaatctcagagagcgccgactctgaaactacccggctctgcagaagcacgctgggcccaggggcttctagactgacagctccatttatcaactacctattggttttaaaaattggagtgtcttttccgcgttgactgattttggctctaagagatgtcgctggtcatttcagagtgactgaacctcccctctaacagatcccgggaattgttttcaggaaaggtaaaaggcagccttttctgtcacaacacaacgctgagccggcagcctggctctgtcaggatctggggctcccgcgcccgagaagcccagcctcgccggcggccaagttcaccgcgaggccccgcgctgcctgcgctgcgctcccggacccgcaccgaccgcagcgcgcgccgccggtgcttctcccaccccagcctggaagctgcctccctccgcctatgcctgcaggataagaagcccgaggaggcggagcatggaactcgacagttaaaacatttaagagagaaaacctagtgtcttgctggcctgaaatcgagtacgcagcccggggtgatcagggtctcccggcccggatgtgtgagacttgcttcccctgggcaataggcgatacgatgctttaggaggaaggtgtctctccctcctaagccccggaggggagaacttccaaagacagaaaaccacaggcttcctggcacagagctttccctttatcagctaaagcagaatcttttctggccttaacctggccccttcctctaactgcaggcagagaggcagacagaaaagcacttgctgaaacacaaagttttgttctgtcctcaacgaactgtctagagctgattgctgatagtcgtggtgcattatgccttcctggttttcatttaattgggcaccacgctgcctttcaagacgccttaaaggaaccaacaaccaaatccaagagagctggacagaccattgaacacacagtaggctgtgtctcgtggctttcgttgtctggtgcctcaaagaaaacaccagaaagattgtttctaagctagagccaccccagattgcttaaagtgcaaagctcactgctgttgggggtacccttgtgagacactggaaagctggttttaccgtggccctatgaagaggaagactgaaatttagacagtaatacctttactaggattggaaaagatttggttaatgacagccctgtcatttctaaaacccattatcactgtatgagagattcctttgcgctgcatcctcgacagtgcttcctaaggctctgccgacttccagttctggaacaagatggttaaactcatttttccctgctctgctcctctaaatacaactaagtaccttggaaactattcagcagacaatgataaagggctctgaaagctagaagaaaaggtgtacttgcaagaaacctcaggacttgagtaacagcaacatggcaggccagaaagcagacccagggaggatagcacatgtcttcggctacactggtgaaggcatcgtgcctgctccacagcacatttttattcaaggtattgtatttgcaaacaaaaatgaagtcccacaaatgcgggactccacctgactctcaaaaagaaaataaatcacaagtgtattttaaaagctacatttgagattagcaaactggaatcaaatgacagatactttatccagaaa

SEQ ID NO: 3232 - DNA, 589 bp, Homo sapiens
tgggaatcacgtaacatttacaatccacttctatgcaaggcagtcttgtgctaaagaattgctaaaagagacagtgccttttgaatgcaccatatgtgttattcaaaagcagtggcaagtcgaagctcctatcttaatcctcgcttgttattatgcctggatccaacttttgaaggataagagatttcacagatcattgattacaaaggcaatagccaacaccaacaccccagacatgagagggatgctaccttcgatgcagcctccctgcccggccccagtcaagccaccgatgactgctactacctgagcaagcccaggagtgggactggtggctctgtaagaagaggaggaggcacctgagctggcacactcagctccttcaccatgtgatgccctgcaccacctcaagactgcagagtccttaccaacaagacggcactcaccaaatgcagcccttagaccctggacttctcagtctttttaactgcttggttttctatcccaagatgattatttcacacctgttttgtctcctcaaacttcatcctaaggtatccttggttatcctttcagctgaagacttcgc

SEQ ID NO: 3233 - DNA, 1375 bp, Homo sapiens
tgccaagttcagctgcctgcagaagcacagctcagagccgtccctataggcctagtccttgcacaggtctggccaatcagagctctgttaccaggcagagcctctctctccagctctggtcactgtcagcctagctgtccaggcacccttctgcaattttcgtttgaattgatttttttaaaagcacctgatatacacttttcttcttattcttctccttctagtcctctattcaaggccctaccacagagacacacaggaacggaactcagaatcacaaacaaagaaactttgatccaagaaagaaaatgatctttaaaaagaccctcgtttcatgctggccgatgctgagaaaatctgctctgaaggatatttggagacactgattaaaagatggttgtcccagtggagggggattcttcgtgttacgtagataggaagcacgatgcaaaagtgttgaagcaggagtgtaaagaataattaaaacacctgcccaagacccaagcaaggataggatttcccagacattcgtgagggagaaaatgccatgtcctttccttctggtgtcacatcagaatctgaaggctgctagagaagggagagaaacatgaaagtgagtcccatgctgattgttgttgaaatacctggaaagaaactggcaaagactatccaagggatgctaagacatgtccgaacttacaaaacagtagaacctgaataggaatttgaagttgtctatactctcctcagccacaccctgccattttacagattgtcttctctggggaagttagctgtcatgttgtgaggatactcaagcagtttataaagaggttcatgtcgcaaggaatggaggcctcctgccaacagccatgtaaaggagccatctaggaaatagattctccagccccagtcagaccttcagatgattacagcccctaccaaccttctgactgcggtggaaggaaggttccggaaccagaaccacccaggaaacatctatgaagtgcctacttgtatctgaatgatggcctggaactaagaagactaaaacatgactcgaacttgagagaccacagtctggtgagaaacataagtggacccaaaaagctaaaacacaatagcaaagaaaaatgctacaatagggtggctaaccaatggcgaagccaagcatagtggagtcagactccctcaattcaaacccaggttctgatgcttattaggttgcaggatctttttctcaaagtctcaattttgtcatctgtaatagtattgcctttatgaaattgctataagggattaactgagataatgcatgaaaagtacttgcactgtgaatggcccatagaaagacttttaaaatgttaattgacac

SEQ ID NO: 3234 - DNA, 14417 bp, Homo sapiens
cagtggcggcagctgctggcccggcactgccccgtgccagctcgctaagcacttggtcccagctggagagacttgataggactttgccgttctgcctgccacagctgttcacttctcaggaagggagtccagaagctatgtggctgcctgtgtggtcagacgtgggtgagaagatgaggatggatgcttgctcctctcatggaaacagataacttccgtacctgccaaaccaatggcagaggagctgggaagctcacaggcattgctgaggcctttgaagatgttagctgagaaaggcagaccagccagcatggagctgccctccctcccactcagcgcctttcctaggccaaggaccaggtgaagccgccttgaccctgatccagccgcctgggttgctgctgccggggaaggcaggcctggtgtggacggaccccctgacttttcaagacacactggaggtcactgagccatgttttgagtcagttctgcatctcatcaagacacaggtaatcagaagaggggtttggaaactcaagagcacataagtgaacaaaacatcaagcttgctcttaaaagtttttcaatcttacgcatgttgaaatggcctcactccagtcttgctcgaagtctgctgggtaaactgcaagttctaacagactaagaggaagtgcttcagtcacctaaggtcgtattttattttgtgcttttccaagcagtgggattatgtaatcacctcgcattgtagcagtcttgctgttcataatcttgctattcatgcagtggggtatagagaggcattaatttaggtcttcatggatctcctgaatccgcaatgatcatttgaaagaagaattccgagcagcttagtggtagagataagacccaacattactttgctgatggaatggtggaggtgtccttttctgctggtccccagataagtaaggagaccccaggggtgaaaaaaccacaggaacacagctcatccccaggaaactggtggacaaatgagcaaagatatatgtgctagggggtttaacataatgctgtggaataaacagggaattggttgaataaattattatacacccatacccatacaatgaaaaactttgcagtcattaaaattgatgtttttctataattaataatattgagcgttactgataatataccattaagtgtaacagaagaggttaagaataattatgtagactagattttcattataaatacatatgtatgttttttatctagggaaaatgttagatgactatatgccaatattttagaagtggttatctctaagtggtgagatttttgaatattgaaaaaacgctttttttctaagtgcttagctgtgttctctaacttttctataataaaataattgtattgcttattaaaattggacagttagaaaatgaatgaagttggtggatgagaggtaaaaggtatgagaggaatttagaaagtaagccaagctgagtaggataagcaaactatgcaactaacttttttggggaaggtgttccctacctgagaaataagcacgtaaaagctggatgagaatgggtttctggggaatgacccaaatctgttagacccccggggttgggtacatcagggaacaataattgttcctccatacttcttcctctcaattttccattgtaatatcacatttttctgggtacatgactacctggaatattggtcacatttttagcctttctggtgattaagtccaggccagtgtgggagtaagcaacctttaggaagcatccgtccggagttttcttttcctctcctccatcttgctatgtggaatgcagacatgatccctagagctctagctgccatcttgaatactgaggacgagggccacacctaatagggaaggggcctgggtttcagagcttccacacccatcctggattacttcacatccagacttttggtggagagctaaataaacttccaccttgctgaatgaactgtgaggctttttttttattatttatgaaaaacagaaaagagaaaaggaaagaaagggagaatgagaagataaagaagaaaagatctaagcccctttagatttgcataatgataatatcaatagctaacctttactgagtgcttctttcttgtgccagattctttgctaagtgctctaattctctttgctaagcactctctaattctcacaacaatctttgaggtgtgtattatttcaaatgtcaatttttagattaaaaaactggggatcagaaaatgatatggtttggctgtgtccccacccaaatctcaacttgaattcccacgtgtttgggaagggcctggtgggaggtaattgaatcatgggggcaaatctttcctgtgctgttctcatgattgtgaataaaagtctcatgagatctgatgggtgtatcaagggtttccgcttttgtttcttcctcattttctctggctgctgccatgtaagaattgcctttcacctcctgccatgattctgaggcctccccatccatgtggaactgtaagtccaattaaacctccttttcttcccaggctcaggcatgtctttatcagtaacatgaaaatggactaatacaataaattggtacaagtagagtggggtgttgctgaaaagatacctgaaaatatggaagcagctttggaactgggtaacaggcagaggttggaaaaatttggagggctcagaagaagacagcaaaatgtgggaaagtttggaacttcctagagacttgttgaatgacattgacaaaaatgctgatagtgatatgaacaataaggtccaggctgaggtggtctcagatggagatgagaaacttgttgggaactggagcaaaggtgactcttgttatgtttcagcaaagagactggcagcattttgcacctgccctagagatttgtagaacttcgaagttgagagagttgatttagcgtatctggtggaagaaatttctaagcagcaaagcattcaagaggtgacttgggtgctgttaaaggcattcagttttataagggaaactaagcataaaagttgggaaaatttgcagtctgacaatgtgatagaaaagaaaatcccattttctgaggagaaattgaagcccgctgcaggctgcagatatttgcataagtaataagctgagtgttaatccccaagacgacaggggggtggtgggaacatgtctccagggcatgtcagaggtcttcatggcagcccctcccatcacaggcctggaggcctaggaggaaaaagtggtttcatgggccgggcccagggtccccgtgctgtgttcagcctagggacttggtgccctgtgtctcagctgctacagctgtggctgaaaggagccaatatagagtttgggccatgacttcaaagggtgcaagcctcaagccttggcagcttccacttggtgttgagcctgcaagtacacagaagtcaagaattgaggtttgggaacctctgcctagatttcagaagatgtatggaaacacctggatgtccaggcagaattttgctgcagtggcagggctgtcatggagaacctctgctagggcaatgcagaaggaaaatgtgaggtcagagcccccccacagagtccctactagggcactgcctagtggagctgtgagaagacggccaccatcctccagaccacagaatggtagatccactgacagctttcactgtgtgctggaaaagctgcagacactcaacatcagcctgtgtaaagcagctgggaggaaggctgtacccaagctgcccaagaccatgggaacctacctcttgcattagcgtgatctggatgtgagacatagagtcaaaggagataattttggaagctttaagatttgactgccccacttgattttggacttgcatggggcctgtagctcctttgttctggcctatttctcccatttgaaatggctgtattcacccaatgcctgtacccccactgtatctagtaagttactaacctgcttttgattttacaggctcgtaggtgaaagggacttgccttgtcttggatgagactttggactatggacttttgagttaatgctgaaatgagttaagactttgggggactgttgtgaaggcatgattggttttgaaatgtgaggccgtgagatttgggaggggccaggggcagaatgatatgatttggctctgtccccgcccagatctcatcttgaattcccacatgttgtgggagggacccagtgggaggtaattgaatcacaggggcaagtctttcctgtgctgttcttatgatagtgaataagtctcatgagatctgatggttttaaaaagaggagttcccctgcacaagctctctctccctgctgtcatccatgtaagatgtgacatgctcctccttgccttctgccatgattgtgaggcttccccagccatgtggaactataagtccaattaaacctttttcttttgtaaattgcccagtcttgggtatgtctttatcagcagtgtgaaaacagactaatacaaaaaatttaaaagttgcccaagttcacaaagctagaaaataatgaatttaggatttgaactcagtatccccaagcccaagcctgcaattctctttttctttttttgagacagggtctcactttgtcacccaagctggagtgcagtgtcatggtcttggcctctgtagcctcaacctcccaggttaagtgatcttcctgcctcagccccccaagtagctgtgactacaggtgtgcaccaccacgcctggctaattttttttgtattttttgcagagacggggtttcaccatgttgttcaggctggtctcaaactcctaaggtcaagtgatccacctgcctcggcctcccaaagtgctaggattataggcgtgaggcattgcaccaggcctgtttcttaaaatataatctgtggtttccccctatgagaatctgggaggtgttaaaaatgtgaatgccttgatcccacccctgactgatttgatcagaatctcctggagtaggattcaagtagctgcatttttatcaagctccctcaccaagtttgatgctactgtaggtctaagctatatcttattctaactcaaatgggggcaatgaatggagttttgacataggctataggctttgtaaattgctagctttctttctttcttttcttttttctgaaagatatttgcagtgcaagtagcttacatattttaatgacttactgagagagcatattaaactaaaattgcacaaaatgctcaaattgctttgaaggtgcctcaaccttgaaaccctaaaatagtactaattgcctattttcatcttttctccatctcccctcaacataaataaatattgtgcaaatgaattatatatagattctattgttaacaagaagaccctctttcttctttttctccgttttggataatccctcctctggtagtctcatttctatgttcatactcacagaaaacattggcttccatagtgcaaagcagggcagagggaagcaggaagcagtggagcaaggggaagagagagggagagagtgaatgactctgaagaggaaaggaaattaacatttattggggttctgccaggccacagacatttttcttacattattgcactactgcactttccatgtattatctcattcatatgctctcaaaaccctatgaagtagatagtattatcctattttatgatgaggaaacagaagttctgatatgggaaatgtcaccaaacaaggtcacacagccagtgtattggcagatccaagattggctgaggctcgtttgacctgaaagcctgggtgtttttaccattcttattgtctgccatccacctgaagtcacctagcatgtttttccatcataaaactcatttggggctctgttttgtaatcaaaatctgaatcgaatgtgaatgcaatttgcttgctgctggttgtaatagcatgaattattgaactctagagctctcacataaaagttaagcatctgaagagactcagctggttgattctatccagtctcccactgctctctcaagggaaaaagattccaagttcaacattagctctcacctgttgtattgttggcactagcttttctcacccatcattgttttctgtctctacagatgcaggggcgagaaggcacaggaataaagtttgtgtggagatctcacagtcaggtcatcaccaaactctttttccttgtgtatacctaaaatgctttccttttctgatatttaaaaagctcaagactctatgcttttgtaattcacctattcatttgtctcctcagtagggtctggaagccacaagaggaatcattttgatagaaagataatgcataggcttcagagacaagagcttgcaggcactttagcaataaaattatgttgttgctttgccaagcatccccttctgtgaggaaccacctgttctctccttaccttctgataggcaggttattcaccctggccacatcatacacacaagggtacgtgggccaggctagccagttagaatatcccaaaccctcagcacagtgatgaggcatgtgcctcaatcagggataattagtattttctctgagatttgatatacagatactgagaaataatctctattgcttttgaattatgagccttcaggttgtggactttggaccaccagtgcaatatagtgtagttcaatgttggctattatattggtgatatttcccaaccagtagacgcactttcctgaaagaagctgtagaaggcagcagaactagatatagcaagctagataggtaactagatagctagagccctgacaataaaatctgaactcctagattaaatggtgcctggttattcagttagatgagatctccaattctctatatccccaatttactgttgattacttaaattacttggagttattttttgacacttgaaactggaccagtcctaaccagcacatatttgaaacccagaaacaaccaacttcataaaaatgtaatatccaaatagcaaaattcagaaacagcaggacgttcagctgccagtgagccctgagtttatttccaattttaaaaataaagggaggtaaaggctgataacagggtaaaagaaaaggaatgtaagtggagtagaatcaaccacagtgacacatacaagggaaaaagcagagctgagatgagaactcaacctgctactgtgtaataagctctttgacacaccctggcaatgcttcccaccaatttagaaaggttggcctggttctctctactcctcgcatcaggtgggaccaacatcaatatgctgagctaatggcttatcaatggtttacttccctgagctggtcatgagattgcccatcactggagaatgcagcccaaaaccaaaaccatcctggcctttgactcaagttatgtatcatttcccaggctaagttatctgctgctggagaattcaggatttgtgtctgaagcatctctgcctctctatctttgaacactgtacacaagtaggtgtttaagaaacgcttgatgaatgaatgagtgaattgctctgaaaacattcaggaattactgttctcagatacatagaatgcatgcaaggttaatacaaatggctgataagaattactcaagtgcagatctattggatgagctagggaaaagaaggattgttttcatcatgttttctaaacatcccccaattttaatgatttggtgttatacacacttacacaaaggttccatactcaaaaagttaggcatcactgaatcagcaaaatcacacaggtttctttgctgactcgcttttcagaagttttattttgtgaacatgatttgcataattgcatctggggcactttgctggaagagcccacgtgtcttgggaatgctgggcaagggaaatgtaactttccctgtgggttcactccactgataaggtaaggggtcaaaaattgtactgtaccctaactttgtagttgctgcttaaccaacgaagccactgtgcctccttcgctcatagtgataatctttttggagcagatttgttgggggaaatagagtaaatattagaaagggctggttagcccttgtgtatgttttctcttctctgataaggagggagacactatgcaaaccccagtgctcacccaacaggaggatcagatccacctggccttggcaaatcccagatgatccacttctgggtgcttgagatcagcagaaagctcacagtgatcttaccaagtggaaatccctaaatccgacattcagatttgagaccagttttataagacactctgcgtgagttttttgtttttgttttttttcatagaaaactttacttcaggagaggtactaggatgcaatagttaagaactcatgttagaatcaagtgggatgttggtttgcattctggcttttgtaactttggccaaaacatttagcatccctgatccttagtttggaccatccacaaattggggctaatactgttatttccctgtgcagcaaactcagcaagtctgggttatccaaaccctgcatattctgacaaaagttttggctcttgcctgggagataacctctaagtccttagaatattttggctgatcagagagattttgtctacctggaggccttgggtcacacgagatagtctaagctaacaatgtgacttatggtgggggctctgggccaaacggtagaagcttgacctctggaggggctggagactgagggcagccacatgggtggtctgagatggtaaatgtcatcacacaatgaaatctccagtaaaatcctggacagcaagtctctggtaaaaagaaatgctgtctgcatgactccactgggagaggacaactggaagctttatggaagctcctggactctgccctaatgtgcctttttccactgctgactaacttattttctttcactggaataaactataaccatgagtataatggctttgctgagttgtgtgagtccttctagtgaataactgaaagtgaaggtgatcttgggacccctgagcacacttcctcatggttttggagacgattaatgtgataaacaatgtagaatacttagtggaatgcctggaaaataataagtgctcaataaataaggaagcttaggagagaggggtaataggcctgctgttatagcttctggtctgacttcccagctctagtcatcattcattccttttttgctttcaacaaatatttttttgagtgccgaccatgctaggtatggtcaagacccttcatggagcttacaatctagttgaggaaacaaagatcagacttataaacacacataaatatataattgcaagctggagtaaacgtgatgaaggaaaagaattatgttatgacctcatgggaggtcagagacttgagggatggaaaggaacccaacgtagggaagattctctttattagctgcttatttatatctgaaattctgttatgtcgtgtgacttttgttatgtgtttctctctttatttattttaatgttttctccgttgtatgttctcactgatatgtgggagctaagctatgaagatgcaaaggcatgagaatgatacaatagactttgggggcttcgggggaagggtgcgagggataaaagaactcaaataaggtgcagtatatattgctcaggtgatgggtgcacccaaatctcacaaatcacccctaaagaacttacgcatgtaaccaaacaccacctgtaccccaataacttatggaaaaaaatgtaaaacagagaaaaaatattttcctgttttctcattcctggactatattagcaagtgtctctctctttctctcccctcagtcttttgctttggcctctcttcttccagtctttggtagaatgctaagacatcataggctcccttttccttctttacctaactcctgccactttgagtctgtgggcatgacatcccttccttccttcttcaagccaatatttatcaaacactcagaatatgccagcctttatctcctggtccctccttcatcagttccagggttctgcagcagggaaaagggaaggaagtaggagtttacatcacctgggcagagaaagagctgcttatagtcagtagtgccttttcagggctgccattggcgtattttcattttttcctccaaacatttccctgagatttctttgaggtgatctcatttccctatcctaggaggtaatccaagatatgtctagagccatatccctggctccaaacataagctggttctcaataaatagcttgggattgtttttgaaatgggctagatgccaatgcccagagctgttcaatgggataggactgaactccccagggaagcaaaagatttccgtcaccatctcttctccaccagggcacagggcacctgtggagaagggcaaggggtacgtgggagcctgaaggatgagggaaagcgccatctcattcggcctgggaggcaattctgccctctttaattatccccctttccagattgagcttttccaataggtgtggcacgtggtgggtgagtctttttccatatggtttgagaaactgagccaaatacaccatgcagagtgagaaaaaaatgagtcaaacaaccctcccaccactacttctcccctggcttagaggaaaagcaaagctctggttgctctaccccggctttctcctcggagaggtttttggagctgaaggaggaatgactaatgacgtggaggtttctcctaatgcaaccagctggcctgggggctggaggtggcccctgaacgtgatttacaacttatacactgtgtccttgaatgaggtactgaacctctctgggcctgtttcctcaactgcaaagtgaagaagatgatttttaccattcttcccaactctaacgataacagacatttatttatttatttatttatttatttatttatttatttatttgagacaagtcttgctctgttgcccaggctggagtgcagcagtgcaatcattgctcactgaagcctcaaactcctgggctcaagagatcctcctgcctcagcctccaaaatagccaggactacaggcacactccaccatgcccagctaatttttatttttgttttgtagagatggggtcttgctatattgctcaggctggtctcaaatgcctgggctccctcttcagcctcccaaagtactgggattataggcatgagccactgtaccagacccagagctttttaaaggtgaataatgaaagctccagaagtatctttaaaatacatcagaaatagaggtgacaggtgagatgaaaccaaattggcaaaatggtaataactgttgaaactttagtcatgggtagaaggcagttcattacattctctgcttttcattattctatagagttgattattctctccacttttgtgtatgtggtcctcctcaaaattgccagtgaggtaaaggtgccacaagctgataggctgtcgtgtgaggaatgaagtgactgtaaatactcccaggcccttggggagaatgaccttgaagagaagatctgaaggagctgggcttgtcctcaattgtcaaaaagttacatcttgatttcaagtggtttacttaattaatctccatcttttaagatttacaagtttgtgtgtgtgcgtatttatacttatttgcagtttaattttgtgataccaaaagaaaaagcctagcatgacccttgttggagaccacaagccctgggaagttggacttcttccctctcagttcagttgtccctgaagccaagacttttttcttttttgagacagggtcttgctctgttgtccaggctggaatgaagtggtgtgaccatggctcactgaagcctggtcctcctgggctcaagcgatcctcccaccttggcctcccaaatagctggggctataggcatgtgccaccatgctcagctaattttttaatttttaggagagactgggtcttgctatgttgcccaggctggtcttgaactctgggctcaagccattctcctgcctctgcctcctaaagtgctgggattacaggcatgagccaccatgcccagctgaagccaagatttttaatcaccaagaccttctgcaaatctgaagtttgcctctttcaaataaaaattcagagcattcttctcatttataccaagtgaaatagacatgaccttggagaagaagtgccctgcctgcctatagagctgaacttcatggaaggagcgagtggctgtgcatcagaggggtgctaaagactcacacaccatttgtccactggacataaggtcatttctttcaacaaaaagtctgaacttagggaaacctcctgaaagtctccaagaaatgggaaagatcactgatgggtaagttatagaagttatttgcaatcatttttcactctgagatagagccaaaagtcttccttaggaatatgagatatggcggaataagtgacagttctcttttccataaggttttatccacataggtgccaatatctttggcattgttcgctgagtcttttgtatctttatcttcagaaagcctttcctatctccttccccaaagcctgggttgggtcttcctcttttgtaagccattgcaccctatacttcccctatcataacactcatcaccctgtgttgcaactgctgttttacttgtctgtctgcacaccagattgtgagctctgtagcagcaggctgtatgacttattcatctttatacttgctacgtctactcattcattcaacaaaaaagtactgagtgcctacaataaatgagacatacacaatacctgcctttatgggacttatattctagtagcatctagtaagcactcatttatttgttaaacaaacaaatggaagagtaaatcaataaatgaatattaaatcacactatgccagttaaacccaacccaaactttggtatttagtcaatgctactcttaacaaaagaactccaacatacccaactagttatttccccaagattggggagtatccaagcatgctagccaaagataaatatagtatttttctaggccatcctttaaaaaggctccattatttaaaacatgccttgagctatatctacatcccagtttttccagtgggtacttgccttggagactctcgcttattgaagactttttctttccaacatgccctctgtactgagtgtataatcaccactgcaggcaaccatgatgagtgacaaaaagtgccagctggcagctccagcaaagggaacaggagagagcaaggaggtatctttttctgcctattcagaacattgaaacccaatttatcgctggcctcatgagccaaagaaagcagctctcagcagctgttgatctgagaggctccaatctcatttccatgagctgggtgtcattgacactcatctggcttgtctgggaatgaattggcatgaaggagtcttcctcttttcatccctgaggatttgggtgggcctgttacaaatggcagaaagagttatatggtcactcttttgaaaataatgccaaagactttcttgtttttgttgtgggtggacattccttaataactactgcctggggggttctactcttctcattgctttcaccctcactcagtaaatgctggttttcgccctcactcagtaaatgctggtaagtcagctctcaaaaaaaaaaaaaaaaaggctctggtttgtagcatttgccaatttccctggtataaatactcctattttggctaccaacagacattgctgaatgtgaagttgggaagagatgtgccctattgcctgctaagagctggtagaagctggctccaaaacaccactacatagctctctaattcacacttgctccagagtgaaagactgcttctggctagcaccattgcctttctacaactgggattttaggatacagtgtattcttttgcatctgctatgtcactgggctctaatcatgacattgcggggtattattatgcctatttggtggatctagaattcttaagatctagaataggtcttaagaatattctttctacactccaccctctccctctcctgcccaatcgctacttatcttttaggtctcagcttaaatatcacattcctgaatgtccatgtcagggtcaggtttccatgtgcttttatgatgctctcacatgctctcatggtggaatttgaccagtggtgttgaagtggcttgcttatttatctgcctccttcactgactgtaaactttgtgaggacagaaacttctacccagcccaccactgatctcagtgcctagtgcagtgtctggcccaataagtattgtgaga

SEQ ID NO: 3235 - DNA, 709 bp, Homo sapiens
gagcgcctctgctcggccgctgtgcaaccctccaagtgtgagcctttctgagaaaagtctacagcattctttctctgcaggttctcttaactacagtgacttcaacagtttttttatactttgagtctgtacggacatttgtacatgagagtcctgccttaattttgctgtttgccctcggatctctgggtttgatttttgcgttgattttaaacagacataagtatccccttaacctgtacctactttttggatttacgctgttggaagctctgactgtggcagttgttgttactttctatgatgtatatattattctgcaagctttcatactgactactacagtattttttggtttgactgtgtatactctacaatctaagaaggatttcagcaaatttggagcagggctgtttgctcttttgtggatattgtgcctgtcaggattcttgaagttttttttttatagtgagataatggagttggtcttagccgctgcaggagcccttcttttctgtggattcatcatctatgacacacactcactgatgcataaactgtcacctgaagagtacgtattagctgccatcagcctctacttggatatcatcaatctattcctgcacctgttacggtttctggaagcagttaataaaaagtaattaaaagtatctcagctcaactgaagaacaacaaaaaaaatttaatg

SEQ ID NO: 3236 - DNA, 23730 bp, Homo sapiens
ccccactctcttctggcttgtagagtttctgccgagagatcagctgttagtctgatgggcttccctttgtgggtaacccgacctttctctctagctgcccctaacattttttccttcatttcaactttggagaatctgacaattatgtgtcttggagttgctcttctcaaggagtatctttgtggcgttctctgtatttcctgaatctgaatgttggcctgccttgctagattggggaagttctcctggataatatcctgcagagtgttttccaacttggttccattctctccgtcactttcaggtacaccaatcagacgtagatttggtcttttcacatagtcccatatttcttggggctttgttcatttctttttcttcttttttctctaaacttcccttctcacttcatttcattcatttcgtcttccatcgctgataccctttcttccagatgatcgcattggctcctgaggcttcttcattcttcgcgtagttctcgagccttggctttcagctccatcagctcctttaagcacttctctgtattggttattctagttatacattcgtctaaattttttttcaaaatttttaacttctttgcctttggtttgaatttcctcctgtagctcatagtttgatcgtctgaagccttcttctctcaactcgtcaaagtcattctctgtccagctttgttccattgctggtgaggaactgcgatcctttggaggaggagaggtgctctgctttttagagtttccagttctgctctgttttttccccatctttgtggttttatctacttttcgtctttgatgatggtgatgtacagatgggtttttggtgtggatgtcctttctgtttgttagttttccttctaacagacaggaccctcagctgcaggtctgttggaatttgctagaggtccactccagaccctgtttgcctgggtatcagcagcggtgtctgcagaacagtggtttttcgtgaaccgcgaatgctgctgtgtgatcattcctctggaagttttgtctcagaggagtacccagccctgtgaggtgtcagtctgcccctactggggggtgcctcccagttaggctgctcagtggtcaggggtcagggacccactcgaagaggcagtctgcccgttctcagatctccagctgtgtgctgggtaaaccactgctctcttcagagctgtcagacagggacatttaagtctgcaaaagttactgctgtctttttatttgtctgtgccctgcccccagaggtggagcctacagaggcaggcaggcctccttgagctgtggtgggctccacccagttggagcttcctggctgctttgtttacctaagcatgcctgggcaatggcgggcacccctcccccagcctcgctgccaccttgcagtttgatctcagactgctgtgctagcaatcagcaagactccatgggcgtaggaccctccaagccaggtgcaggatataatctcctggtgtgccgttttttaaacccatcggaaaagcgcattattcgggtgggagtgacccgattttccaggtgccatctgtcacccctttctttgactaggaaagggaactccctgaccccttgcgcttcctgagtgaggcaatgcctcgccccacttcggctcgtgcacggtgcgctgcacccactgacctgtgcccactgtctggcactccctagtgagatgaacccggtacctcagatggaaatgcagaaatcacctgtcttctgcgtcactcacgctgggagctgtagacctgagcagttccttttcggccatcttggctcctctgtcccaaaagtattcagtgtattaagttcctggtttttcctctgtggatctgatcttcctccaggcttcctcactagagtaagtatatcctccattaattcacttgtccgaggcagaaatatggaatatggaagtgatcctaaaatttgtttctttttcttttttattttttttgagatggaatctcgctctgtcacccaggctgcatgcagtggtgtgaactctgctcactgcaagctccacctgctgggttcaggcgattcttccacctcagcctcctgagtagctaggattacagtcatgtgccatgatgcccggctaatttcgtgtttttagtagagatgcggtttctccatattgttcaggctggtctcgaactcccaacctcaggtgatctgcctccagaagtgcgaggattacaggcgtgagccaccacacctggctgatcctaaaatttctaagcctcaaaatatattttgaatatatctatttcacttcatcctcactgcatctcttggtccaagctgccatcttttttattagaactattttagtagccttgtaactggtctctctatattgctcttaattccttccaatgcatttgttatgaagaagccaggattattttttaaaccctaaaaaaatcttaaaatgccccagtgattttctgttgtatttgggatgtataaaagtagaattatatttaacacggctttttagactattgcaatttagtccctagctacttttgtgtgcttatcttgagccattctcccctctttctgacacactgtccttaatttagttccctaaagggccatctaagaaagttcacacttgctccctctggttgaaacactcttctttttgcctgctcatccttgaagtctcaaataaaatgttatttcctcattgaggggatccctgaaggaccaatttaaactagatatacctcattgctctctttcatagtgtgcagtaaagggttaattcagcaagcttgaggtgctcacattctgcacattccaaagaaaggtctgtttttagatcatctctggaagataacttctgagccttgggaatattctgcctgatatgaggattttgtatgcctgacaccttgtgccacacagtgccattttggttacacagcttatgctaacaatgtgatttatgttgagtgcctgtttttgctgagggaaccagagtctgagtagttgaggccagtggcaagtgagctacatgtctttgtttctggctccctaatgaaaaccctggacgccaagcctcaggtgagcttccctggttggtaacacctatatgtgttgttgtacatcattcctgagagggattagtacatccccatgtaacttcactgggagagacacctgggagtttgcttggctcctcatggaaattatcccaggtgcgttttccctttgttggattctttctctgtaacaaaccataactgtgagtgtaactgcttttctgagtcctgtgaatttttctagtgaatcatcaagcctgagagtgatattagagaccccaaaacacattgtaccttatttgtttccttaaaaacaactatgttcatttgtcattatatataattgtttatttactcttttttattttgcttacatccagacattctataaatgtagaaattaggcagtgaattattttgtttctcatcgtattccaattcctagcatagcacaacaggtgctcaataaatgtttggggaattaaaaattaaatgtaagataaaaatacatgaaagaaattaagtgaaagattaatttggaaaggttaaatgccatatgattccagctatatgagattctggaaaagccaaaactatgaatacagtgaaaagatcattaattgccaggggttggggagagggaggaatgaataggtggagcatacaggatttttagggcagtgaaactatgttgtatgatactgtcattgtggatacatgccattacacatttgtacaaacacatagaatgtacgacaccaagagtgaaccctcatgtaaactatggactttgagtgattacatgtcagtgtaggtttgcccattgtaacaaaggtaccattctggagagggatgttgataatggggtggggttgggggtgctgtgcacgtgtggggcgaagagtatagtatgtgggaatatgttctgcaccttctccattttgctgtgaacctctctaaaaagtaaagttatttaaaaactgaatgtacagtatttggtgcaaaataaatagctctgaagaactttaagatttgataacattgtcttccaatttgatttcaacctttaaatattataatttagctttatttcctgaataattacacatataattgaaaatagtcccagtatttcaatttgtattatagatttgtgataattctaataactgtgttttcactcagttctgagtttcttgtcaaacttgtataaaattcctactataatctttaagtttgttatggaggattttggagtgactgatgggatataaggaagagacaaaacgcaagcagaattattctggttggcttaagaaaataaagtgaagcagtaggtgatgagctgtcactggaaggagaattctaaagctgtgaagagcataattaattaaaggactttgcagcttgctcttgacccacattttaaattacagagagttagtaaaccaggactagaaatctccaaagatataaagcagaatagaccatagtttgacttacaaataggaagaacaggggtaatgaaaaatcaatttaggagcctaaaaagtctgctatagtgactgataagtagcccactgttttttacatgtttttgaatttatctctgtattctgagaaacttgaagttattttcccctggtcctatgacactgtctgcagttgatggaaactgatgtgggagaaagtgatggaaagaaattaggagctattggaaaccagtcatttgcaaatgagtgccctgacttctcagaatatatcctgaaatggtaatgtcactcatcttcctaattctaaattagacatgctctgttgcattggttgaaattcctactttccatctgtcgaggtggaggatgctgaagtggtcatgttttttttttaattaatatttttttgcatgtctggcacatgttcctcttagtcttgttaaacatctggttttcccattgaggatctattctttggccacgacccaggtatgtgagacttgctgacccaatcagatttgcacttgggaatttagatctagagtagaaatatcagccacaaactggttgtcctagttactaaatcctgaagaggcagccattaaattctgctgtctgtgttctcagtaatgtcataattcttcatttttttgctgagaaacatcatttctttgagtctatgagataccaaatacagacagagctggagcctcaaggttaaggagtgttaatctctcattgccaggaagagccacctcgtggatgacacatggcttgggaaatgtttttaggctggtggagatgtgtctaaacagatatatttttagggcccccttgtaatatctattctggcaatgatgcttttattctaattaatacataatctagcactgaagaaaatgcttcttagaatatttttcactgaaaaattggatgtggttactgttgttccacagtagagtgaattcagtgaaataagcttgtggattttggctactgcactactcctttttctattcactcattgtcattccataaacatttacagagtgtacactatatataacacactgtactaggggctgagggagctgctgctgggaacatttttatgtgagtaagatgatcagcttttctagatggaaacttaagggacttgaggaaaaagccatttcagacagataggaatccgtgatttttaaagacttttgagagattgtgatttttttgaagctatcttttataacagttccaaaatacagtctagaagttaaccacacaagacaacagaaaattcccctactaacttaaccctaattcttttccttaaatccatttatgccttttccttcattattgtatctaaagaatagctgattccttataataatccttcatatagttaatagtgttaatgaaaaaaatcctttacatagttaaggcagttactaagtcacttttcagcctttttttcccctccaggctaagtaatccaattatgttaagtttatgccataattaaactaaagattgctttaggaaagtttaatcacatcattgaaatatcccccaactaaaccaggtgcttgtcaagaaatgtggttagtgaccttgtaaaagctaatgaagtttcatattatatgttattttgtgttgtaaacacaatctggcagagacctcgaggaaacaaataaataaagcaactgaatcaaaaccattgtctctcagcgaggcttgacatttaagtggactatccaaagcaagtatgaagcatgacttattgcttaaaaaaaaccctgagcacagaacacttggtattgttgcaataatgtgttaaaaaatcaacttccacactgaataggtttgaatctgatgcacgcccagtgaaagtgtagaagaaacttagaattattaaactaagtgatgtcatgtttacgttactttcccatgtcctctgccctctgctagatgttggtgggtggtccagttgtggtactactttaccaccttgctatgatcaaggtatgtgtttgccataagcatctctatagccataattgttcttctattctttttttaagctacacaattcttacttgaaaaatagcaggtaggatttaacatgtcctctgtataacttagacaacatacatgtttcaaataactttatgtccatcagccttctttcatcatctttatttcctcttctggatgctatctaaaatagggaagaaggaaattattttggttgtccttgatttttatccttctgacataaacatgaggctgacctggaatttgtatcagaagctctgtgacctctccgtttcagctcttttagcttttaacaatttgatgttctgagtgtgaagactaggacgaaccaagagagatgcccagagggcaacatttaagaaggtcttcactttgtgttctgcaaaggttgactttgagagcttcctagcctgggccttcctaattttttcttttacacattaagtgtgcagtggatatacagacattggaatgtggttggaggagaagaatcatacttttgctgtgattctgagaagcctgattcatgtagtagtgagataagggtttcttggaatcaggagtgggatcctctgtatccagtctctgtggctaaatcaaggtctatattctggtccttatgattttttttttctcttctcttttgacttgtgctgatgttatgggctaaactgtgtctccctcaaaattcatatattgaagtcctcatctccagtacctcagaatgtgactttattacttcatttgtttgtttgtttgagatggaatctcactctgtaacccaggagtgctgtggccccatctcagctgactgcaaccccgcctcccaggttcaagtgattctcctgcctcagcctcccgaatagctgggattacaggtaccagacaccatgtctggctaatttttatatttttattagagaccaggtttcactatgttggccaggctggtcttgaactcctgacctcaagtgatctgcccaccttggctccccaaagtgctggtattacgggcatgagccaccgggcctggccagaatgtgactatatttagatttaggttctttaaagaggtcaagttaagcaaggtcatatgttgagccctaattcaatatgactagcgtccttatgaaaaaagaaagaggcatcaggattgcttccacacagagaaaaggccatgtgaggacacagtgagcaggcagcctctgcaagccaaggagagctgcctcaggagaaaccaaacctgtcaacaccttgatctgggaccttcagcctccagaactgtgagaaaataaatttctgttgtttaaaccacatagtctgtgctatctttttatggaagccctagcaactaatatagttgattatatggccagtgttactccaggaaagtcctggtatatgaacatctccccttcctagccttgaccatgaccttcctaggtactcacacatgaacacttagttggtgttatttcattctttactctttaacttcaaagaagctattctaggattaagaaatccctttatgggttataattagaatttgaggccaagctaagaaagacctctggaggcttttctttgctccaggaataggattgtaaattttaatggattggctcattgttctttaagtttgaggccatgctcagtccctgccgtttttacctacggtagaaaaatatagacttaatgtcattcttgaatgatgaactatgcctgtcttaaaaacaaaaagctcacagtttctataatgtacatttaatgattggaacaatttatttttccttccaattcttttatttaatttaaggttaaactacatctcttttctcttaaacacctgcaatatataaactccaataacaataaattaaaatgtttaaaaatgggccaaaagtacacttctttcaggaagtgattcttgaaaatctggcagaagtttgatggtgttgagagctggtaatgtatgaagaaacctaagactagtgactgttatcctaggactgattacactgtaactggctcaagtattcctatctacgaaaggagggtgttgccccgatcatttctagttctgtcatggaacaaaggtaaataaaaataattgaaaaactaagattatgtgttcaaatactaggtggctggccacattatctgaacttccagtttctcatagctgagttgaaaaattccaggagaacctctttctgatccagtaacagtctgagccaaactgtccaagcaacctatatttaagcacttgaaattttaccctaaactaagctttttagactcaaatcgtgtgggcctggaagggggtgtggtagggatggtggacagctgaagaacagagccctgagattgcctacagggacaccaggcctctgccttacaggatatggccgtcctatagaaggatgggatctatggtttctggatgtttgtattttctaggagaaaccaggcattcagatttcagtatcaagtctaattttaaaatgttggcaaccagtacattatttttagacgtgcagggaaaatagacctatctgctcttgtttacaatattctcatagttcccaaagtaggagctatgcaaacattcactgacactgtattcatggtgcatggtgtccgtttctgtgggaagcctgcaacagtgtttttcaaactgcattccctcagagcctagcagatcttctgtggctatgcaaggctactgatgtgttagcttccttttcctttttttttttttgactgggtttacaattctatttgaacaaaaggtcgttttggtcaatatatgtaaagtgtttacaatacttggcacatagcaagcactactatgtgttagctactattattagcaaggagtttgtaagacattttctgtagggataataagttaatgtcctaatgattctattacgttgttccaaagaaataccatccttcagtttcatgaaattcaaaagctttttaatgcacccttaaagtttttatgaaactttaaggtttcataaaatactgaaaaagtagctgtattttatctaagactttaatgtgggaaaacccaatgagagtccttgctcgtttgcaaccttacttttgctatgtttgcttttaaattaaaaaagaattttacattttcatttcttatctaggttgcccacagctgggctgacttgtgcgattttacctttgaatctgagagtacaaatacattcatcaatattctatttcccaaaggtatactaattctcgtgaataatcacaacaatcatggcaaatttttagagattataaccgaatcattcctctgcaactgctatacagaaagactgtgttagaagctggttaacttgatgatctctcaccctctggtcccctgacctacctttgcagtcttgaactccagcaatgaggagtatatcactttcttacctttcttgcatcattacctctgcccagaatgcctctcacatccctttgattgtcaaaattcattccatctttcagtgatggtttcaaatcttgccttctccaggaaacttttcttgctccctcaatattacaatcaccttgtgccagccctgctatttccttcctttgagacctcttaacagtttattcctgtatatttgaaggtacttataagttcttatgatgcatgtttgcataacttctatagctctgtattcagctttatgaaggaatgtagataaaccatgtattgtggagtaatattgcacataaaattaaatcataaacatccctgtatttaggcatagagtatagactcttggtaccttttactgtgaggtgtaaggccctccatagtcagcagttgcagtataacctcctacagtttttcttcaatcacattagaactatacatgcaaatagtataaattctacttacatcagacttgtttcaccagtttaacatgcttttctcttacttttattcttatagatggtgctttttcttggctctataaaataccatattcttagtgatatcttgagttgttggttagtttatggcacttaataaattccttttaggattaaatttagattgtgagccctaccgttctttaacattgcaatagtttcccacagaagggtggatgaatcttcatattcattttgcttttatatataaagatgaagtcatcagtataccagatatctagcttttattcccaatggtaacttgttacctcccaagagaagaggccacatagggaagcacctgggtcactcagaaggcagagggagtaagggggaaatataggtgggctagacttggacatttaggaggaacctgatggagtaacataatcacaaagtaactttcaaatgctgactgcccgatgtccagtaaagactcagagatgatacatgaggtaaaacatctctaaagccagtgtcatagcgtgtcatagttagctgggtcttctctttcccactgctcaggtgctcatacaatcctgtttgtctgggattgaaaccatttatgccttttgtcactgtatacttattaagtgacactttcaccctcaaaagtgtcccagtgtagataacaatttatatggtccctctactcataatagccctctatttcctaatttattggccttactatacctgtaatataataaaaaaactacattttcagatagtattatcatattgggttaatagagaagacttaaaactgattcattagctaaaaagctatcaccaaaaacttgtacattgttttcatatagataatttctcaagacaaaactccccaaattttggatctttgctttaaaaattggagaacttagaagccagaagattttaattctagattcaaatctgacattacattttatttgagcaactttctcattcttttggaatgatggattacttacttttaaaataaaataacacaagattgataaaaacatgattactagaaggataaaatgacaatgtaaaggaaagggttttgaaaataaaaggcaggaagtattattgtgttatataggaaaattagtgacccaatttgacaaaaagtcattctgttttcaccaataaagaaacgtataatcattttatgcagaaaaaatagtgaggcaaagttagcatagagaccacatctagggaaatacatgctaaatataaatgaataatgcacgtaatgaattatgcatgattttaaattagttgatgaaatagattcattatagatgataatgcaggatttctgatcctcgttttgaatttgataccgaagtaaatcattgtgttggaattccctctgacagcccttgcagtgtaaatctctccatgtagcttgttcaattcattcttcttaatgaggagggaggaaggagaatgctggcagcattacaacaaaggaatatgaaagtgaggcaacagctgtataagggattaaaatatggagaaagagcataacatatatgcatttgcttatgaatgaacatttttagcaaaagccatttacagttcagtgtccacatggccttgcagaatagggactctgttttcttgttggctgatttgagcctttccagtcagttttcccatttgttctacttttttgatgtttctttagttatctagcattttggtttggatgttttctattttccttggtttgtggccagttagaccagctggtggtaatgaggttgttggccagtcctggaggcagcagggagggtcatttgacagaatgttttccatagctggagcctgctttcaggattaatgacaagaatagcagccagtttttgttttaagtacctactaaatatcaggtgcttcacaagcactatcgaattggattcttataattcttctttgatttgagtgtttatctctcacatttcactaagcaggagacccaagcttacggagagcaaataatttggctcacgtcttatgcctagtaagtgactaagctagaaagtgcaatcagagttttctcactctatagcttgtgctcttcaccagcaattacttctcaaatgtttacctgttcagaaggagccacaagcaagaatagaactaaatgcatcagaaacacctgtcaccatagggaataaaagctaggtatctggtcagctgatggcttcatctttgtatgtgaaagactacattgttatttagcaccatgtatttgtgtctagacctctttcttgacctttctggtggtcaaaaagaaacaaatgaacaaacaaacaactgctaatccactaaattataagaaatctctgagaggaacaatgcctcaaggccatctactttcttgctatcattggaatatatttacttcttcaggaatgcatgcttttctctaccccaaatgtggacacaacttatagattaagaactccttggttgtgtctttggatcctttgacacctgtttcaagactaagttaagtttctttacctaatctaactaaagtggtgaccacaagtggaaattcctacgacatcaattttccgaaccatgcatttggcagtttacatttaaggaagtttattgctagctaaacatttctgcctgaacactaagtcctgtaaaacctttgaggaaaagggccatgtcatgttctttttgtatctctaacatatcagataaatgcttggtgcataggaggtgctcaatatatactgattactttggtctatctaacacccaatggagagatctggagagttctgtaaactcatcaattgatgtatgcctaagtattaatttgtcatagataacaaatttcatgttaccataaatttaagagtatttcatagcattatgcatgagtaactgaaactgcagaagctgtccctaattgtagcttaatgaattacaaaatactttattctagctgaggaggctgatgacaattaaatgaaagcatgaaaaggacctgggcttgatggtgagaaaatctcaaacttcttagctcctctgtcttctttgtcccaatatgcattccttcccagatgtgctgcacatgttaaggcttttagggattaatcaaagcgcatttgtttgcatttacttgggagtatgatagcctcaaaattccatatttagtgtatgtttgatcctctcagttcttcattgtttgtatgtacacaagcggaaatagaaacataggttatctaaggagcaaataatttggtttctgtactttccccctatcaatatgaagaaattaggtacagctttttgaagagtatgttagaagtcaaatgactaccattaaaaattacaggccaggcacagtggctcatgcttgtaatcccagcactttgggaggccgaggcgggaagatagcttgagtccaggagtttgagaccagcctgggcaacatgacgaaaccctgtctttacaaaaattaaccaggccttgtggtgcgcacctgtagccgcagcttcttggtaggctaaagtgggaggactgcttaagcctggggaggtagaggctgcagtgtgccatgatcacacaactgcattccagcctgggtgacagagcaagaccctgtctcaaaaaaaaaaaaaaaatcaaattataataatcaaatgatttttccattagatcaatgaattcagggaaaggtctattttgatttgttaccctgttgttgttaaattgttccctataattcagcctatagaatattttttcacagggctttctgaatgagacttgacagatagaagcttacttttcctctctggttcattacttatattgtctgtgtacttttccatctcaatccttcataaatgtctattaactgattccctattgtactctggtaaaagaatataattgaagtaatttaaaaaattaatggaacagaaatactgactatgtcccagtttgctgttaccttcccatacccttcagttataaatctatttcccatgcaccattactagaatcatacgttgtgaaactctgacttcatcttaggatgatttctttaagatattctattagaaacttctaaaaacatgcctctgagcataatgttttcacacagcatgtgtattattaatttttgaaaatgcagcctcaaaaaccgattacatttgtcacactgtgatggaaacatttactcctggaaatggtgttaaggccatcaaggcaagctgcctcagaagctgagccattatcatcaccttgtctgtatgtacatcctctcctgccagctaccagcttttatcaggttagtgagtacatgagaagtcaatgacaacattaggtttgcaaaggttcatttggaagttagcattttgtttgagcccttctctactctattaaagccaacatatacggctaatatttcaatgaatgtgatcttagctccaacctttcctctgcgcctggcctcctcaagtcttttcaatctatagtcccacttgtttctacctgtgctcaggcaatttcttctgctgacccatcctcccaccccttcatgcaacatatttctaaattttggatatatgcctgtcattcaacatgcaactcaattgctgcacctcctgagaagtatttgctgattctcacagccagaattcatttattcattcacactctagtgtctttggccgctttaatctgtacccttaagctattttataaagtatgtagcagtgtaacctacaggagagtgccttttgttttaatggcacctaggatttgttttaataatatatagtaagacactcagacacagaaaagattgccatgaaggaagaactgtttattatactcacagttccctggaaataggaggcacaaccctccatgcagggccacatggggaagcagcaaggagagaggagaaggcagaaggtcgcggggagaggccttagtgggttgaatcctttattgtggttttcttgggaagaaagaagtgaagcaaggtaagcaggcttcggattggttagtttgaatgatttttgtgggccctgggctataagggctgtcctggttgttaccttgccctgtggtgactaggtcaggggagagaggtgtgagagctgatacaggaggtagctagaggtaagggctctagattggttggtttatgtatcaaagagtgatcacgggcaagtcctttactgtctttaggaataagctagcccttttaggggcagttcttcctgaggtcagcaaggacccagatgccaggtggttaaaaatatgaaaaaataagaaaacagtcaatataccttactttcttagaaatctctcacacataatgacccccatggcccctattctattggtatcatctcctgatgtaatctctcagtggctgttgccccacggattctctccaaatcacaaaatttgcattcctagaagaggaactgtgtttggcttcacaatctgttagagcaaaccttaagatgtctcagcaggggccaggtggactgagcagtttcccccaggagaggtttgtgggtctagcagagaccatgattattatatgtgattggtactgagtttaagaagggaaaagacaggctgggtgcagtggctcatgcatgttatgccaacattttgagaggccgaggtggacggatcacctgaggtaaacactagcgtggccaacatggcaaaacactgtctctactaaaaatacaaaaattatctgggcatggtggcacatgcctgtaatcccagctactccataggctgaggcaggagaattgcttgaacctgggaggtggagtttgcagtgagccaagatcatgccactgcgttccagcctgggtgacagagtgagactccatcaaaaaaaaaaaaggggaaaagacatgaaccttcaccctcaaagagcttccaatataaaaaagaaaaaaaaagttcatatgaataacatagttcatttgaaaaagctttgtacaaacagcaaagtaatatatggataatacatgtatatatatacacatataatatatgtatatagtaatatatggatttttaaaattgtagtgataataataatagtaatatttaacatgtacatacttcttattaaatgccagaattgttttccaagtgctttacatgtatattctcatttaatcctcagaacaaccctattacgagggttttataattacaataattttatagatgataaaagtcacagaaaggttaagtaacttgctcaaggatacatggatcatgacagagctgagattgaaacccaggattttgatgattgtgctgataggcagtatatatacttctactgtaggtggacaaccatattctcacaatgtgacatatcagacttcatataaaaatagctaaaggcctgtacattaagcctttcagtagtacgtgcacatcattttatttgctatgtattatggactgtatgtgtctcccccaaagaaattcatatactgaaaccttaatccccgatgtattgatatctggagatgaggctttctggaggtaattaagtcatgaaggtgaagctgttatgatgagattagtgccttataagaagagatggagagagctttctgccttcccccactctatgtggggatataaccaggaagagggcccttgccagagaccagatatgttggcatcttgatcttggacttctcagtctctaggcctgtgagaaatagatgcttatgtgaccagtctatggtatttgttatagtagtctaaactgactaagacactatgtaattcatctgaatattattgaagttattactcttgaaaaatggctttagtccaaggaaagattacacatgtgtaggttgagtgtccctaatccaaaaatcctaaatctgtaatgctccaaaattgaacatttttgagcactaacatgatgctcaacgtgcatattcattggagcatttcagattctggatgctcagttggtgaactataatgcattaaaatgctcttgaatttaatgaaatcgaaggttggtgtttggatggtcttcaggtttttggattaaagatgctcaaccaatttggtataatgcaaatattccaaaattccaaaaatctgaaatgtgaaacatttgtgtttctaagcattttgggtaagagatgttcaacctgtgtaataatgcaaagataatgtggttcatacgcttggatgacatttttagacatattcatagcctttagggaatggacatttgaaaaaatatagttttcctagtgacctgggcttactcttccccaggaaggttgatattgccatgtaaccaggattcagtttcttcttataaggaagcaacatatccttcattacattaacatgcaatagaaagttccacttagtgatatttcactgaaccagtcacaatctcagcactgccttgttcaaacaaaagaactctctccagcataaaacccaaacaaccagatggcgaactagtacatcctatacgtgttgctactcaagtatgttttccaacatcttggctgccagggaatgacactgatagcgtaaatatgtcagtgataatttgtcagtatggcctactaatgacagaaactgtgacttcaaaatgatttaaaaggttgtctaagcaatagctagctgtcaacccagaaattttgaatggtatctttgcagtagaatgagcatgaagatagcaagtgaattatgaattcttctagattttagtaggtacccttttaagtacatggaagccagagaagtgccatcaatgacttgcaaaaagaaccctgtgagttatggctatctatttaagaaaaagaaggtaagactttcatcaacactttacaacattctacaagtacacaattttattgctgtcttttctttattcttatttgtatgcacatcccaaatctaacatggtacattattctttaaaaacataattattttcctggtttgaattaagatgtaatatgaccttttagaagaaaacagagccattgcatgttttgtttgtatacttcttatacaaaataaatgtagtcatgtgccttgaaaaaagtgagggacatatatatatatagtcacctcaagaaatagactgtgatgaaagattcacaaatagaaagcaacacaggaaagacattgctgattatgcagttttagaagcagggtcaagaaagagtgagtaaaagaaaaagatatacatttatagtagaaagcaaacaaaaatctccattgtgaaaatcacttccaaatcatttccccataatatagggaaactgatgatagtctacttgctgtggccttcaattcttaggcaatatttttatatattccggagaaaatcattgagatttgctttgcatgcaattctacttcagctcctttctaactggccaaatctatcccttttatttatgaatttgattataatgttaacaacaaccacaactaaacccaaataatgtactggcccgggaataaggcatacaaactgcaaataaatgtatttaggcagatattagtatcttgaatcagaagtacatgttaaaatattattggacttcctctttgaaaagaaagttggttttgttactttatttacttatcaggttttattgcaggccatattatatttcgacagttctgtaatgaaagtgtattctggactgcagagtggtgctaaattctcagataatggaataaaactgctttgaaaaaacatatttaactcaagtatagtttgtccagttcagtttagaagtgactttgcctgaaaaggaaatcgtgtaattctaggaaagagcaaagatttttctaaaatggagaaaaggtattgaaaacattgcttttacttttagaaagaaagtgtggcaggtcatgagagaaatcaaagtcaggacagcagtcattctcctgcagaaaatgcaggcacgtgagcagagagtgctatagaaagtgccttcttcttttcctcaggtcacccgctgggcttgggaaagggttccttcactaccaaagtacttcagttatttctctcatgtccgagacctgtctgtagtagcatctaatacaaatctggaatacttccattgagggaattcttgtctaactcttagtggaccttaacattccagcaggctgggaacaggaagtagagtcttgagtacttctatgaccacctcccttgtctactatatattcctgttctcctcctcattgtgtccttacgaaatttgcatttggactgttagtcttggtctttggatcttttaaatcatttaagaataaggtcattactctgggtcttttaatctgctcttaactcctcaaacctgatctacaaagtgtgattagaaggtgctgttcttagtcctgttatgaaataaaaggtcatatttagcacataaaattcttatctattactttaaatacattttctctttcagtattaaactcttgctctgaaatttaacaacggtgaaactttcatgaacgtgagaaagccatatatgttatcacttactaataagcagtaatgataataatagaagtagaaattagtttaaaaataaatgtatttggcaatgaacataaagtgttacacagtgactgagattgctaacagtgattcttaattattcttgatgttatagtcgtgggaattcttttgaaagaccacagagaagggggagataaaaggatcatgagatgaacccctgaagtttactttggagaatttctatttctaaaaccatatccaaattattagtactctaaaaaataccatcagtcaaagtaaattggctacggtaaaacagaaaaaagccatcgataattaaattttgggtaatgtgtgaaaattatgaataatttatgttccagacatatctgactgactttggttcattgtcttgactattggggtactggtataggaaggaatgatgtgttttcagcgtggaaaatatttatggtatagttgtgttataattatattgtcaaaaaacttgtttttaaatacatagtccacctgactgaggcattattaatctctactgtagatagataatcttgagagacatttgacagttgaatccgacatggaggaaggcatttgaggttaggttaaatgtataaatacagtatattccacagaaattagtgatgggaaaagcaaaaacactggcattcaattatagagaaaccattgttttcgtttcttgcttggattgtgtgcacagtatagaacttaatagcaagcagagatttcccatggagagttcatgacaggcaacaggttagtgggagagacatagcttgcactcctgcagcagtttgatcagaagattccttgcactctcagatgctcaagaggataataaactgactggcatagcaacacagaaatctggaagattatatacaaatataaaattgctacgctacactgtttcagctaagcctcccagagatactcatatcaggtggcacggataaaggacatcatggtgttctgcaaaatgatacacaagtgtgtcatgtcacacactgggaaaacttagccaccttaaattgtgaaatagaaagtaggctatcctttcctttacaaaaatatggctgcctgatgttggtaagtccatcctgtaagatctttctcctttctcaagcccagagttggaggattggcataccctttgcctgtagattcctcctcagaccaagagggtaagtagaaatccaatcatgatacagaagggttctgtaattttcagagtacacaggctcctctgaacctaagtggactctgcagttgttggaacaaatacacatatccttagtctctttgggattctctttctgaagggttgggtatgaatcactgtgctgcctgggtcccctgaagtcagttctagcaactggtctctcctaacctgcagagcatgagctgtgcaaatatgatacaggcagagatgacccctacaaaaaaaatgaaggagatgttggcagcccctaagaagagtagaagctattactcctggagatgttgggaagctggaagtaggtcagcaatgcagatgactgaggagatgaatagaaccaggagcaggaagtagggatgggtttacacttgactgggaaagactcagctagaggcctgtcactggactcccaattgctttagagaagaaagtgtgtaacagctatagcaaggaaatagagctaggttgaagtgtatcaaagtaaaaaggacaggaatagaattttttgatacagtggattgcttaaggagtgtcaggtagtctgacaaggagatgtgactggaagtaagatcacaaagaacatttaggactaacaagacagctgatgtgtttgaccagtttataaaaaaatactagaataaaaagaaagatctcacattgaagggaatacttttttgtccctgcaacatttattttaagttctggagtacatgtgcagtatgtgcaagttcgctacataggtaaaggtgtgccataacggtttgctgcacagataaagacattacctaggtattaagcccagtatccattagctattcttcctggtgctctccctcctccccctacaccgacagcccccagtgtgagttgttcctcccacatgtgtccatatgttctcattttccagctcccacttatacatgagaacatgtggtgtttggttttctgttgctttgttagttttttgaggaaaatgatttccagttgcatctttgtccctgcagaatacatgatctcattcctttttatggctgcatagtattccatggtgtatgtgtaccacattttctttatccagtctatcgttgatgggcatttgggtttattctatgtctttgctattgtgaatagtgctgcaatgaacatataattgcatgtatctttataatagaatgatttatatatttttgggtatatatagaaagtaatggaattgctgtgtcaaatggtatttctgcttctagatctttgaggagttgccaccctgtcttacacaatggttgaactaatttactctcccaccaacagtgtaaaatgtttctttttctctgaaaccttactagcgtctgttgattcttgactttttaataattgccattcttagtggtgtgagatggtctgtcattgagattttaatttgcatttctttaatgatcagtgatgttgagctttctttaatttttttggctgctcgaatgtcttattttgagaagtgtctgttcatgtcctttgcccactgttttttttttttttttccaagacgtagtcttgctctgtcacccaggctggagtgcagtggcacaatctcggttcactgcaacctctgcctcccgggttcaagcaattctcggacctcagcctcccaaatagttgggattacaggcacccatcaccgcacctggctaattttagtatttttagtggagagagggtttcaccttgttggccaggctggtcttgaacttctgacctcagcttgtgatctggccgcctcagtctcccaaagtgctgggattacaggcgtgagccattgtgcccagccctttgcctactttttaatggggttgttttgttttttctttcttttcttttcttttttttttttttgtaaatttatttaagttccttgtagactctggatattagactgggtagatcgcaaccttgtactcttgttacagccatttggttttgatgtgttatactgtcagatttaattttgcctttctttctctcttttttttttttttttgagatgagaccttgcttcatcacccaggctggagtgcagtagcttaatcatagcccactgcagcctcacattcctgggctcaggtgatcctcctgtctcagcctcctgagtggctgcgatgttttcttttcttctattattgtagagacagattcttgctatgttgcccagactggtctcaaacccctgagctcaagtgattttcccaccttagcctcctgaattactgggattacaggcatgaaccattgctgtgccttattttttgatttt

SEQ ID NO: 3237 - DNA, 2972 bp, Homo sapiens
ataaaatactggcaaaccgaatccagcagcacatcaaaaagcttatccaccatgatcaagtgggcttcatccctgggatgcaaggctggttcaatatacgcaaatcaataaatgtaatccagcatataaacagagccaaagacaaaaaccacatgattatctcaatagatgcagaaaaagcctttgacaaaattcaacaacccttcatgctaaaaactctcaataaattaggtattgatgggacgtatttcaaaataataagagctatctatgacaaacccacagccaatatcatactgaatgggcaaaaactggaagcattccctttgaaaactaactcttaagatacttgtagaatgtgtgatcacagtgctctccctgttaccataggacaccttccctattgcaatagtgcctttactccttttgcaataattattttgaatgaagtctcttcttactaactctggatttgcttttatttgacaatagcatatggtgagtttgtgaccagaggcaaacggccaaggccaatgactccagctgtgaatgccagtaggatgccccaaggcccagatggggccctctgcaccccagggacaagaccagacaaattgctccatggtatgtaggccagtggggatcagaggatgatggttagatttggagctcctttgccacagataaggggtctcatcatgccctccttcagccagttgatattttggagaactggggctgcagtgctcccaaggactgacaactcagaagaaataaactgtttcttccagcttaaaagtcttttttgaatgtaatattgttacagaaaagtatgtgtgtgtgtgtgtgtgtgtgtgtgtgtgtgtctgttaccagcaaggacttatgaagcttatgagggtgactaactctgttaaaaaaaaatagacaaaagccacattttcttagtgcagttgacagtagtgtgtgcaaatttgccaccagctatactagaattacgaatcaaagaaaacaagatgatatttcacagcaataaatgtgaaatcttgcctttgggttcaaaaacatgtaagtacaggatgtgaatatttggtttaggaacagcacggcaatactcaggaagaaaaaattagtggttgtattagtcaggaattttttggttgccacttacaaaaatccaactgggattaggcaaaagggcaaaaagggaatttattgactctcagaatccaagaacaaccagactgagggaagggcagggaaggctgctaggtttcagggataaatgggcaagggacacaaaagccctgggttctctccgtttcttgactgggctggcctctctttgggtggcattctctcttctgtgttttattctctcttgctacagtctatctttctgcacagggcaggattatggcccttaaacgcttctgaagatcatcccttctaacttttgctagtggacttggaagaggctggctctttcagatgcagccagacaagacctgaggaagaattctgatgggaaacctgcaaagacatcctcaatggtaaattttagccatcttcaataaaaaagggaggacttagagaatttgtgagaaggattcacttctgtatcccccaccctcaagagtgtttttcacatggtgagttgtgtcttaagaaatcaattttgtgtttcacaactagcattttttaaataacaaaatacaattgaatggaatgaaatagaacagacaaaaatattgagtttacaacatatagcaagagtaagttatgtttcataaaacgtatttcaggtaaacatgtgtgtgtgcaacatcatacatgtcatgttgtaaaatatatttttactgtcagttgtagcccaaacaaaagtttgaaaaatattgtcttaagtttaccctctggaaaagtacaatttgactttgatctgaatgagttggtcttattaaagaatcaagatggtgttggctagactagcttttgccttgtggtgggttctaagaatatttttattttttctatgtcccatatcagatgagtgggagtctctcagtttttcaagtcctctcaggaagcaaaacaaaatgaagtaataacaattgcttcctacttacctaagcaaatgctttttgcttgtgatttccccaggactgttacaggagatgaagacttgatcagtgtttctaagtacctttgaggattagagtaatcagtaatgcatatctgtcatccataaaagcaaatgtgtacttcctactggacttttccatttgctgaagtcaggagaaccaacatggcttgtttgaattaaataaggtcactgttcgaagaatcaatcttgaggaagagaagtaagagccagtagtagtattgcaaagcataaccctgttcccaaagacacgctgagccctggagactagggcatgaggcaaaggagctgaagaacgctcaaaactgttctcaatgattattccattttggggcaaatgtacatgaaaatggtagtaccagagaaacagctatatgccagaaagcctgagctctgaagagaggcatggagaactcaatttcactaagtccagaggatgactaaaaatgccaagataggctcaaggtgaaatagatcccactggaagttcagaaggacagttttgagggtttctaccccagggaaaccacttagaattgtaaactggatgtttacatgatgaaattggccttgagcctgtgccacccagatgccaaaacaaaacaaaatgaaacaaaaacaccccaaaactcaaaacaattctttggccaaactgataatgagtaatgattaacaaaatgttcttttccttggtgagatgcctggaagaaagactctgtatctcctaggtggcttaaagaagcctgtgtgttctcatatcctggggaggtgaaggcagagctaacgcctctcctactggtgaagttccctg

SEQ ID NO: 3238 - DNA, 521 bp, Homo sapiens
ctttagaagtgaaagctttaatcccgtgattcatgaaagcaaagtggtaataatttaagtaccatattttatttatccctcagagttgtcaactgataccagaagtatttccactcttttggggttgctgcctttggccatctaattgcttcttaggaaggaagagggaaattgcttctagaactacgcggattgtctttggcagcgtcgagctgaggcatcaatcagtccatctggtcttaggtttatgcctgtacctccatagactgcttacttcatttagttattcaaaaaccataattagtgcagtaattaacgtgtggatccttcaaaggaagactgctagaatcatgggacgtgtctcatcattcttactgatgtgtggatgataaagagactgaggctgctgtgacaacaggacttgtattactgcacagtaacggtgctgcagggaaattcagacaggaccttggtccacagagccccaacgtttgaaaaaagtaattatccacactgtttcc
